(19) United States
(12) Patent Application Publication
(10) Pub. No.: US 2002/0081301 A1
(43) Pub. Date: Jun. 27, 2002

(54) Cancer gene determination and therapeutic screening using signature gene sets

(76) Inventor: Daniel Soppet, Centreville, VA (US)

Correspondence Address: CARELLA, BYRNE, BAIN, GILFILLAN,, CECCHI, STEWART & OLSTEIN, 6 Becker Farm Road, Roseland, NJ, 07068, US

(21) Appl. No.: 09/962,436

(22) Filed: Sep. 25, 2001

Related U.S. Application Data
(60) Provisional application No. 60/235,082, filed on Sep. 25, 2000.
(60) Provisional application No. 60/234,924, filed on Sep. 25, 2000.

(51) Int. Cl. C12Q 1/68; A61K 39/395; A61K 31/00

(52) U.S. Cl. 424/155.1; 514/1; 435/6

(57) ABSTRACT

Processes for assaying potential antitumor agents based on their modulation of the expression of specified genes, or sets, of suspected cancer cell genes, especially for stomach cancer, are disclosed, along with methods for diagnosing cancerous, or potentially cancerous, conditions as a result of the expression, or patterns of expression, of such genes, or sets of genes. Also disclosed are methods for determining functionally related genes, or gene sets, as well as methods for treating cancer based on targeting expression products of such genes, or gene sets, and determining genes involved in the cancerous process.

[0001] This application claims priority of U.S. Provisional Applications 60/235,082, filed Sep. 25, 2000 and 60/234,924, filed Sep. 25, 2000; the disclosures of which are hereby incorporated by reference in their entirety.

### FIELD OF THE INVENTION

[0002] The present invention relates to methods of assaying potential anti-tumor agents based on their modulation of the expression of specified sets of genes and methods for diagnosing cancerous, or potentially cancerous, conditions as a result of the patterns of expression of such genes.

### BACKGROUND OF THE INVENTION

[0003] Screening assays for novel drugs are based on the response of model cell based systems in vitro to treatment with specific compounds. Various measures of cellular response have been utilized, including the release of cytokines, alterations in cell surface markers, activation of specific enzymes, as well as alterations in ion flux and/or pH. Some such screens rely on specific genes, such as oncogenes (or gene mutations).

### BRIEF SUMMARY OF THE INVENTION

[0004] In accordance with the present invention, there are provided characteristic sets of gene sequences whose expression, or non-expression, or change in expression, either an increase or decrease thereof, are indicative of the cancerous or non-cancerous status of a given cell, especially stomach. More particularly, such genes whose expression is changed in cancerous, as compared to non-cancerous cells, from a specific tissue (in particular, stomach) are genes that include one of the nucleotide sequences of SEQ ID NO: 1-568, or sequences that are substantially identical to, or incorporated in, these sequences. Such a change in expression may be an increase or a decrease in expression or activity of the gene or gene sequences disclosed herein.

[0005] It is another object of the present invention to provide methods of using such characteristic, or signature, gene sets as a basis for assaying the potential ability of selected chemical agents to modulate upward or downward the expression of said characteristic, or signature, gene sets.

[0006] It is a further object of the present invention to provide methods of detecting the expression, or non-expression, or amount of expression, of said characteristic, or signature, gene sets, or portions thereof, as a means of determining the cancerous, or non-cancerous, status (or potential cancerous status) of selected cells as grown in culture or as maintained in situ.

[0007] It is a still further object of the present invention to provide methods for treating cancerous conditions utilizing selected chemical agents as determined from their ability to modulate (i.e., increase or decrease) the selected characteristic, or signature, gene sets as disclosed herein, where said genes include, or comprise, one of the sequences of SEQ ID NO: 1-568, or sequences substantially identical to said sequences, or characteristic portions of said sequences.

[0008] In one aspect, the present invention relates to a process for identifying an agent that modulates the activity of a cancer-related gene comprising:

[0009] (a) contacting a compound with a cell containing a gene corresponding to (such as a gene that encodes an RNA at least 90% identical to the RNA encoded by or complementary to) a polynucleotide having a sequence selected from the group consisting of SEQ ID NO: 1-568 and under conditions promoting the expression of said gene; and

[0010] (b) detecting a difference in expression of said gene relative to when said compound is not present

[0011] thereby identifying an agent that modulates the activity of a cancer-related gene. Such a process is especially useful for agents effective against cancer of the stomach.

[0012] The present invention also relates to a process for identifying an anti-neoplastic agent comprising contacting a cell exhibiting neoplastic activity with a compound first identified as a cancer-related gene modulator using an assay process as disclosed herein for determining gene modulating activity and detecting a decrease in said neoplastic activity after said contacting compared to when said contacting does not occur.

[0013] In a further aspect, the present invention relates to a process for identifying an anti-neoplastic or anti-tumor agent comprising administering to an animal exhibiting a cancerous condition an effective amount of an agent first identified according to a process as disclosed herein and detecting a decrease in said cancerous condition thereby identifying such an agent, said decrease including the death of the cancerous cell or cells.

[0014] The present invention also relates to a process for determining the cancerous status of a cell, comprising determining the level of expression in said cell of at least one gene that corresponds to a polynucleotide having a sequence selected from the group consisting of SEQ ID NO: 1-568 wherein an elevated expression relative to a known non-cancerous cell when the sequence is one of SEQ ID NO: 1-314 or a reduced expression relative to a known non-cancerous cell when the sequence is one of SEQ ID NO: 315-568 indicates a cancerous state or potentially cancerous state. Such sequence identity may include 100 percent identical as defined herein and any number of such genes may be used.

[0015] In an additional aspect, the present invention relates to a process for determining a cancer initiating or facilitating gene comprising contacting a cell expressing a test gene (i.e., a gene whose status as a cancer initiating or facilitating gene is to be determined) with an agent that decreases the expression of a gene that encodes an RNA at least 95% identical to an RNA encoded by (i.e., a gene corresponding to) a polynucleotide having a sequence selected from the group consisting of SEQ ID NO: 1-314 and detecting a decrease in expression of said test gene compared to when said agent is not present, thereby identifying said test gene as being a cancer initiating or facilitating gene. Such genes may, of course, be oncogenes and said decrease in expression may be due to a decrease in copy number of said gene in said cell or a cell derived from said cell, such as where copy number is reduced in the cells formed by replication of such cells.

[0016] The present invention also relates to a process for determining a cancer suppressor gene comprising contacting a cell expressing a test gene (i.e., a gene whose status as a cancer suppressor gene is to be determined) with an agent that increases the expression of a gene that corresponds to (i.e., encodes an RNA at least 95% identical to an RNA encoded by or complementary to) a polynucleotide having a sequence selected from the group consisting of SEQ ID NO: 315-568 and detecting an increase in expression of said test gene compared to when said agent is not present, thereby identifying said test gene as being a cancer suppressor gene. The sequence identity may include identical sequences, as defined herein, and such a process includes embodiments wherein the increase in expression is due to an increase in copy number of the gene in said cell or a cell derived from said cell, such as following cellular replication.

[0017] In another aspect, the present invention relates to a process for treating cancer comprising contacting a cancerous cell with an agent having activity against an expression product encoded by a gene corresponding to a polynucleotide having a nucleotide sequence selected from at least one of SEQ ID NO: 1-314. Such a process includes an embodiment wherein the cancerous cell is contacted in vivo. The agent may include an antibody. In a preferred embodiment, the cancer is cancer of the stomach.

[0018] The present invention also relates to a method for producing a product comprising identifying an agent according to the assay processes of the invention wherein said product is the data collected with respect to said agent as a result of said process and wherein said data is sufficient to convey the chemical structure and/or properties of said agent.

[0019] The present invention further relates to a process for treating a cancerous condition in an animal afflicted therewith comprising administering to said animal a therapeutically effective amount of an agent first identified as having anti-neoplastic activity using one or more of the processes of the invention.

[0020] In a further aspect, the present invention relates to a process for protecting an animal against cancer comprising administering to an animal at risk of developing cancer a therapeutically effective amount of an agent first identified as having anti-neoplastic activity using one or more of the processes disclosed herein.

### DETAILED SUMMARY OF THE INVENTION

[0021] The present invention relates to methods of assaying for potential antitumor agents based on their modulation of the expression of specified sets of genes and methods for diagnosing cancerous, or potentially cancerous, conditions, especially of stomach, as a result of the patterns of expression of such gene sets and for determining cancer-inducing or regulating genes, and gene sets, based on common expression or regulation of such genes, or gene sets.

[0022] In accordance with the present invention, model cellular systems using cell lines, primary cells, or tissue samples are maintained in growth medium and may be treated with compounds that may be at a single concentration or at a range of concentrations. At specific times after treatment, cellular RNAs are isolated from the treated cells, primary cells or tumors, which RNAs are indicative of expression of selected genes. The cellular RNA is then divided and subjected to analysis that detects the presence and/or quantity of specific RNA transcripts, which transcripts may then be amplified for detection purposes using standard methodologies, such as, for example, reverse transcriptase polymerase chain reaction (RT-PCR), etc. The presence or absence, or levels, of specific RNA transcripts are determined from these measurements and a metric derived for the type and degree of response of the sample to the treated compound compared to control samples.

[0023] Also in accordance with the present invention, there are disclosed herein characteristic, or signature, sets of genes and gene sequences whose expression is, or can be, as a result of the methods of the present invention, linked to, or used to characterize, the cancerous, or non-cancerous, status of the cells, or tissues, to be tested, especially tissues derived from stomach (i.e., cancer-related genes and gene sequences). Thus, the methods of the present invention identify novel anti-neoplastic agents based on their alteration of expression of small sets of characteristic, or indicator, or signature genes in specific model systems. The methods of the invention may therefore be used with a variety of cell lines or with primary samples from tumors maintained in vitro under suitable culture conditions for varying periods of time, or in situ in suitable animal models.

[0024] More particularly, certain genes have been identified that are expressed at levels in cancer cells that are different than the expression levels in non-cancer cells. In one instance, the identified genes are expressed at higher levels in cancer cells than in normal cells. In another instance, the identified genes are expressed at lower levels in cancer cells as compared to normal cells.

[0025] In accordance with the foregoing, the present invention relates to a process for determining the cancerous status of a cell, comprising determining the level of expression in said cell of at least one gene that corresponds to (i.e., encodes an RNA at least 95% identical to the RNA encoded by or complementary to) a polynucleotide having a sequence selected from the group consisting of SEQ ID NO: 1-568 wherein an elevated expression relative to a known non-cancerous cell when the sequence is one of SEQ ID NO: 1-314 or a reduced expression relative to a known non-cancerous cell when the sequence is one of SEQ ID NO: 315-568 indicates a cancerous state or potentially cancerous state. Such sequence identity may include 100 percent identical as defined herein and any number of such genes may be used.

[0026] Thus, the present invention also relates to a process for identifying an anti-neoplastic agent comprising contacting a cell exhibiting neoplastic activity with a compound first identified as a cancer-related gene modulator using an assay process as disclosed herein for determining gene modulating activity and detecting a decrease in said neoplastic activity after said contacting compared to when said contacting does not occur (i.e., comparing expression when said agent is present versus when said agent is not present).

[0027] In preferred embodiments of the present invention, such cancer is stomach cancer.

[0028] In a further aspect, the present invention relates to a process for identifying an anti-neoplastic agent comprising administering to an animal exhibiting a cancerous condition an effective amount of an agent first identified as having such activity using a process as disclosed herein and detecting a decrease in said cancerous condition thereby identifying such an agent.

[0029] It should be kept in mind that the anti-tumor or anti-neoplastic agents identified by the processes of the invention include both novel agents whose structure and anti-tumor activity were not previously known prior to identification of their activity by the processes herein as well as non-novel agents, whose structure was known but whose therapeutic value as anti-tumor agents was not appreciated prior to identification by the assay processes of the invention.

[0030] In accordance with the foregoing, the present invention relates to a process for screening for an anti-neoplastic agent comprising the steps of:

[0031] (a) contacting a compound with a cell containing a polynucleotide comprising a nucleotide sequence selected from the group consisting of SEQ ID NO: 1-568, or a sequence at least 95% identical thereto, under conditions wherein said polynucleotide is being expressed, and

[0032] (b) determining a change in expression of at least one of said polynucleotides,

[0033] wherein a change in expression is indicative of anti-neoplastic activity.

[0034] In particular embodiments, such change in expression may be an increase or a decrease in expression or activity. Of course, decreased expression of cancer initiating or facilitating genes is highly desirable, as is an increased expression of cancer suppressor genes.

[0035] More particularly, the present invention relates to a process for screening for an anti-neoplastic agent comprising the steps of:

[0036] (a) exposing a known cancerous cell to a chemical agent to be tested for antineoplastic activity;

[0037] (b) allowing said chemical agent to modulate the activity of one or more genes present in said cell wherein said genes include or comprise one of the sequences selected from the group consisting of the sequences of SEQ ID NO: 1-568, sequences substantially identical to said sequences, or the complements of any of the foregoing;

[0038] (c) determining the expression of one or more genes of step (b);

[0039] (d) comparing the expression of said genes in the presence or absence of exposure to said chemical agent;

[0040] wherein a difference in expression is indicative of the ability of anti-neoplastic activity.

[0041] Thus, in one aspect, the present invention relates to a process for identifying an agent that modulates the activity of a cancer-related gene, especially for cancer of the stomach, comprising:

[0042] (a) contacting a compound with a cell containing a gene that encodes an RNA at least 95% identical to the RNA encoded by (i.e., a gene that corresponds to) a polynucleotide having a sequence selected from the group consisting of SEQ ID NO: 1-568 and under conditions promoting the expression of said gene; and

[0043] (b) detecting a difference in expression of said gene relative to when said compound is not present

[0044] thereby identifying an agent that modulates the activity of a cancer-related gene.

[0045] Such sequence identity includes embodiments wherein the RNAs are at least 97 or 98% identical in sequence and include cases where the sequence is the same, thus where a gene encodes an RNA with the same nucleotide sequence as an RNA encoded by one of the sequences of SEQ ID NO: 1-568.

[0046] In one embodiment of such processes, the sequence is selected from SEQ ID NO: 1-314 and said difference in expression is a decrease in expression. Here, the gene used encodes an RNA like that encoded by one of the sequences found to be expressed at an elevated level in cancer cells, especially stomach cancer cells. In another such embodiment, the sequence is selected from SEQ ID NO: 315-568 and said difference in expression is an increase in expression. The latter sequences encode RNAs found to be expressed at higher levels in normal cells, such as stomach cells, as opposed to cancer cells.

[0047] In specific embodiments of the present invention, said chemical agent to be tested modulates the expression of more than one said gene, especially where it modulates at least two said genes, more especially where at least 3, or at least 5 of said genes, or even 10 or more of said genes in said signature set, are modulated. In a preferred embodiment, this may include more than 10 (such as 20, 50 or even 100) or even all of said genes are modulated.

[0048] In one embodiment of the present invention, said gene modulation is downward modulation, so that, as a result of exposure to the chemical agent to be tested, one or more genes of the cancerous cell will be expressed at a lower level (or not expressed at all) when exposed to (i.e., contacted with) the agent as compared to the expression when not exposed to the agent (i.e., when said agent is not present).

[0049] In a preferred embodiment a selected set of said genes are expressed in the reference cell but not expressed in the cell to be tested as a result of the contacting or exposure of the test cell with the chemical agent. Thus, where said chemical agent causes the gene, or genes, of the tested cell to be expressed at a lower level than the same genes of the reference cell, this is indicative of downward modulation and indicates that the chemical agent to be tested has anti-neoplastic activity (or activity in reducing expression of such cancer-related genes).

[0050] In a separate embodiment, exposure of said cells to be tested to the chemical agent, especially one suspected of having anti-neoplastic activity, may result in upward modulation of said genes of the cell to be tested. Such upward modulation is interpreted as meaning that said genes are expressed where previously not expressed, or else are expressed in greater quantities, or at higher levels, when exposed to the agent as compared to non-exposure to the agent. Such upward modulation may be taken as indicative of anti-neoplastic activity by the tested chemical agent(s) of the gene, or genes, so modulated, resulting in lower neoplastic activity on the part of such cells, such as where increased expression of the gene, or genes, results in decreased growth and/or increased differentiation of said cells away from the cancerous state.

[0051] The genes useful in the assay processes include, respectively, as a part thereof at least one of the sequences selected from the group consisting of the sequences of SEQ ID NO: 1-568, or sequences substantially identical thereto. Such sequences also include sequences complementary to any of the sequences disclosed herein.

[0052] The genes identified by the present disclosure are considered “cancer-related” genes, as this term is used herein, and includes genes expressed at higher levels (due, for example, to elevated rates of expression, elevated extent of expression or increased copy number) in cancer cells relative to expression of these genes in normal (i.e., non-cancerous) cells where said cancerous state or status of test cells or tissues has been determined by methods known in the art, such as by reverse transcriptase polymerase chain reaction (RT-PCR) as described in the Example below. In specific embodiments, this relates to the genes whose sequences correspond to the sequences of SEQ ID NO: 1-314. Also specifically contemplated are genes whose expression is higher in normal as opposed to known cancer cells (as determined by other means, such as uncontrolled growth, change in antigenic surface proteins, genetic mutation, and the like) such that the decreased expression in cancer cells may be indicative of, or contributory to, the realization of the cancerous state. In specific embodiments thereof, this relates to the genes whose sequences correspond to the sequences of SEQ ID NO: 315-568 disclosed herein. As used herein, the term “correspond” means that the gene has the indicated nucleotide sequence or that it encodes substantially the same RNA as would be encoded by the indicated sequence, the term “substantially” meaning about at least 90% identical as defined elsewhere herein.

[0053] The sequences disclosed herein may be genomic in nature and thus represent the sequence of an actual gene, such as a human gene, or may be a cDNA sequence derived from a messenger RNA (mRNA) and thus represent contiguous exonic sequences derived from a corresponding genomic sequence. As described in the Example, the expression of these cancer-related genes is determined from the relative expression levels of the RNA complement of a cancerous cell relative to a normal (i.e., non-cancerous) cell. Because of the processing that may take place in transforming the initial RNA transcript into the final mRNA, the sequences disclosed herein may represent less than the full genomic sequence. They may also represent sequences derived from ribosomal and transfer RNAs. Consequently, the genes present in the cell (and representing the genomic sequences) and the sequences disclosed herein, which are mostly cDNA sequences, may be identical or may be such that the cDNAs contain less than the full genomic sequence. Such genes and cDNA sequences are still considered corresponding sequences because they both encode similar RNA sequences. Thus, by way of non-limiting example only, a gene that encodes an RNA transcript, which is then processed into a shorter mRNA, is deemed to encode both such RNAs and therefore encodes an RNA complementary to (using the usual Watson-Crick complementarity rules), or that would otherwise be encoded by, a cDNA (for example, a sequence as disclosed herein). Thus, the sequences disclosed herein correspond to genes contained in the cancerous or normal cells used to determine relative levels of expression because they represent the same sequences or are complementary to RNAs encoded by these genes. Such genes also include different alleles and splice variants that may occur in the cells used in the processes of the invention.

[0054] The genes of the invention correspond to a polynucleotide having a sequence of SEQ ID NO: 1-568 if the gene encodes an RNA (processed or unprocessed) that is at least 90% identical, preferably at least 95% identical, most preferably at least 98% identical to, and especially identical to, an RNA that would be encoded by, or be complementary to, such as by hybridization with, a polynucleotide having the indicated sequence. In addition, genes including sequences at least 90% identical to a sequence selected from SEQ ID NO: 1-568, preferably at least about 95% identical to such a sequence, more preferably at least about 98% identical to such sequence and most preferably comprising such sequence are specifically contemplated by all of the processes of the present invention as being genes that correspond to these sequences. In addition, sequences encoding the same proteins as any of these sequences, regardless of the percent identity of such sequences, are also specifically contemplated by any of the methods of the present invention that rely on any or all of said sequences, regardless of how they are otherwise described or limited. Thus, any such sequences are available for use in carrying out any of the methods disclosed according to the invention. Such sequences also include any open reading frames, as defined herein, present within any of the sequences of SEQ ID NO: 1-568.

[0055] Further in accordance with the present invention, the term “percent identity” or “percent identical,” when referring to a sequence, means that a sequence is compared to a claimed or described sequence after alignment of the sequence to be compared (the “Compared Sequence”) with the described or claimed sequence (the “Reference Sequence”). The Percent Identity is then determined according to the following formula:

Percent Identity=100 [1−(C/R)]

[0056] wherein C is the number of differences between the Reference Sequence and the Compared Sequence over the length of alignment between the Reference Sequence and the Compared Sequence wherein (i) each base or amino acid in the Reference Sequence that does not have a corresponding aligned base or amino acid in the Compared Sequence and (ii) each gap in the Reference Sequence and (iii) each aligned base or amino acid in the Reference Sequence that is different from an aligned base or amino acid in the Compared Sequence, constitutes a difference; and R is the number of bases or amino acids in the Reference Sequence over the length of the alignment with the Compared Sequence with any gap created in the Reference Sequence also being counted as a base or amino acid.

[0057] If an alignment exists between the Compared Sequence and the Reference Sequence for which the percent identity as calculated above is about equal to or greater than a specified minimum Percent Identity then the Compared Sequence has the specified minimum percent identity to the Reference Sequence even though alignments may exist in which the hereinabove calculated Percent Identity is less than the specified Percent Identity.

[0058] As used herein, the terms “portion,” “segment,” and “fragment,” when used in relation to polypeptides, refer to a continuous sequence of nucleotide residues, sequence forms a subset of a larger sequence. Such terms include the products produced by treatment of said polynucleotides with any of the common endonucleases, or any stretch of polynucleotides that could be synthetically synthesized. These may include exonic and intronic sequences of the corresponding genes.

[0059] As used herein and except as noted otherwise, all terms are defined as given below.

[0060] In accordance with the present invention, the term “DNA segment” or “DNA sequence” refers to a DNA polymer, in the form of a separate fragment or as a component of a larger DNA construct, which has been derived from DNA isolated at least once in substantially pure form, i.e., free of contaminating endogenous materials and in a quantity or concentration enabling identification, manipulation, and recovery of the segment and its component nucleotide sequences by standard biochemical methods, for example, using a cloning vector. Such segments are provided in the form of an open reading frame uninterrupted by internal nontranslated sequences, or introns, which are typically present in eukaryotic genes. Sequences of non-translated DNA may be present downstream from the open reading frame, where the same do not interfere with manipulation or expression of the coding regions.

[0061] The term “coding region” refers to that portion of a gene which either naturally or normally codes for the expression product of that gene in its natural genomic environment, i.e., the region coding in vivo for the native expression product of the gene. The coding region can be from a normal, mutated or altered gene, or can even be from a DNA sequence, or gene, wholly synthesized in the laboratory using methods well known to those of skill in the art of DNA synthesis.

[0062] In accordance with the present invention, the term “nucleotide sequence” refers to a heteropolymer of deoxyribonucleotides. Generally, DNA segments encoding the proteins provided by this invention are assembled from cDNA fragments and short oligonucleotide linkers, or from a series of oligonucleotides, to provide a synthetic gene which is capable of being expressed in a recombinant transcriptional unit comprising regulatory elements derived from a microbial or viral operon.

[0063] The term “expression product” means that polypeptide or protein that is the natural translation product of the gene and any nucleic acid sequences coding equivalents resulting from genetic code degeneracy and thus coding for the same amino acid(s).

[0064] The term “fragment,” when referring to a coding sequence, means a portion of DNA comprising less than the complete coding region whose expression product retains essentially the same biological function or activity as the expression product of the complete coding region.

[0065] The term “primer” means a short nucleic acid sequence that is paired with one strand of DNA and provides a free 3′-OH end at which a DNA polymerase starts synthesis of a deoxyribonucleotide chain. These include PCR primers.

[0066] The term “promoter” means a region of DNA involved in binding of RNA polymerase to initiate transcription. The term “enhancer” refers to a region of DNA that, when present and active, has the effect of increasing expression of a different DNA sequence that is being expressed, thereby increasing the amount of expression product formed from said different DNA sequence.

[0067] The term “open reading frame (ORF)” means a series of triplets coding for amino acids without any termination codons and is a sequence (potentially) translatable into protein.

[0068] As used herein, reference to a DNA sequence includes both single stranded and double stranded DNA. Thus, the specific sequence, unless the context indicates otherwise, refers to the single strand DNA of such sequence, the duplex of such sequence with its complement (double stranded DNA) and the complement of such sequence.

[0069] In carrying out the assays of the invention, relative antineoplastic activity may be ascertained by the extent to which a given chemical agent modulates the expression of genes present in a cancerous cell. Thus, a first chemical agent that modulates the expression of a gene associated with the cancerous state (i.e., a gene that includes one of the sequences disclosed herein and present in cancerous cells) to a larger degree than a second chemical agent tested by the assays of the invention is thereby deemed to have higher, or more desirable, or more advantageous, anti-neoplastic activity than said second chemical agent. Alternatively, where first and second chemical agents modulate expression of more than one of said genes, but where the second modulates expression of, for example, five said genes, whereas the first modulates expression of only three of said genes, especially where the three form a subset of the five, then the second chemical agent is deemed a more potent anti-neoplastic agent than the first. Such anti-neoplastic activity, as determined using the assays of the present invention, may necessarily include combinations of the foregoing possibilities, which are in no way to be considered limiting.

[0070] In utilizing these gene sequences for the assays according to the invention, the genes whose activity is to be determined with and without the presence of the compound to be evaluated for antitumor activity may be any one, or several, or any combination of the gene sequences disclosed herein as SEQ ID NO: 1-568. However, how the gene sequences are employed in such assays depends on the pattern of gene expression disclosed for the signature sets. For example, a sequence that is expressed in cancerous cells but not in normal cells will identify a potential anticancer agent by that agent's ability to decrease expression of the sequence, or sequences, in tumor cells. Conversely, a sequence, or sequences, expressed in normal but not tumor cells will identify a potential antitumor agent by its ability to increase expression of those genes in the tumor cells. The same relationship holds true where the sequences are expressed in both cancer and normal cells but are expressed at a higher level in one than in the other, and vice versa. Based on the expression patterns disclosed for the gene sequences and signature sets disclosed herein, it should be readily apparent to those skilled in the art how to conduct assays for potential antitumor agents using the signature gene sets. The same holds true where the sequences, or signature gene sets, are utilized to determine the cancerous state of a cell or use of an agent to treat a cancerous condition.

[0071] Thus, in one aspect, the present invention relates to a process for screening for an anti-neoplastic agent comprising the steps of (a) exposing cells to a chemical agent to be tested for antineoplastic activity, and (b) determining a change in expression of at least one gene of a signature gene set, or a sequence that is at least 95% identical thereto, wherein a change in expression is indicative of anti-neoplastic activity. Such change in expression is intended to mean a change that includes any activity of the gene, and may be an increase or decrease thereof. In addition, such change in activity may be a change in expression or other activity of at least 1 such gene, such as 5 or 10, or more of the genes of a signature set, even as many as half of such genes or even of all of the genes of a particular gene set.

[0072] The gene expression to be measured is commonly assayed using RNA expression as an indicator. Thus, the greater the level of RNA (such as a messenger RNA) detected the higher the level of expression of the corresponding gene. Thus, gene expression, either absolute or relative, such as where the expression of several different genes are being quantitatively evaluated and compared, for example, where chemical agents modulate the expression of more than one gene, such as a set of 3, 4, 5, or more genes, is determined by the relative expression of the RNAs encoded by such genes.

[0073] RNA may be isolated from samples in a variety of ways, including lysis and denaturation with a phenolic solution containing a chaotropic agent (e.g., triazol) followed by isopropanol precipitation, ethanol wash, and resuspension in aqueous solution; or lysis and denaturation followed by isolation on solid support, such as a Qiagen resin and reconstitution in aqueous solution; or lysis and denaturation in non-phenolic, aqueous solutions followed by enzymatic conversion of RNA to DNA template copies.

[0074] Normally, prior to applying the processes of the invention, steady state RNA expression levels for the genes, and sets of genes, disclosed herein will have been obtained. It is the steady state level of such expression that is affected by potential anti-neoplastic agents as determined herein. Such steady state levels of expression are easily determined by any methods that are sensitive, specific and accurate. Such methods include, but are in no way limited to, real time quantitative polymerase chain reaction (PCR), for example, using a Perkin-Elmer 7700 sequence detection system with gene specific primer probe combinations as designed using any of several commercially available software packages, such as Primer Express software, solid support based hybridization array technology using appropriate internal controls for quantitation, including filter, bead, or microchip based arrays, solid support based hybridization arrays using, for example, chemiluminescent, fluorescent, or electrochemical reaction based detection systems.

[0075] In one embodiment of the present invention, a set of genes useful in evaluating, or screening, or otherwise assaying, one or more chemical agents for anti-neoplastic activity in the assays disclosed herein will have already been shown to have differences in the ratios of steady state RNA levels in cancer cells, or tissues, relative to normal, or non-tumorous cells or tissues, or will have exhibited differences in the expression ratios in tumor samples compared to normal samples between genes in a given subset of the set of genes disclosed herein, or will have gene expression that has increased from undetectable levels to detectable levels, or vice versa, as the case may be, especially where sensitive detection methods are employed, or conversely will have decreased from detectable levels to undetectable levels with such procedures, especially sensitive procedures.

[0076] The genes, and gene sequences, useful in practicing the methods of the present invention are genes that are found to be selectively expressed in, or not expressed in, cancer cells as compared to non-cancer cells, or in which expression is down-regulated or up-regulated, as the case may be, in cancerous cells as compared to non-cancerous cells. Thus, these may include genes, or sets of genes, expressed in cancer cells but absent from, or inactive in, non-cancerous cells, or may include genes, or sets of genes, expressed in non-cancerous cells, but not expressed in cancer cells. Alternatively, the genes useful in practicing the present invention may be more expressed, or less expressed, in a cancerous cell relative to a non-cancerous cell. Such genes are generally those comprising the sequences of SEQ ID NO: 1-568, with SEQ ID NO: 1-314 exhibiting elevated expression in cancer cells related to normal cells and vice versa for SEQ ID NO: 315-568.

[0077] In accordance with the foregoing, the present invention further relates to a process for determining the cancerous status of a test cell, comprising determining expression in said test cell of at least one gene that includes one of the nucleotide sequences selected from the sequences of SEQ ID NO: 1-568, or a nucleotide sequence that is at least 95% identical thereto, and then comparing said expression to expression of said at least one gene in at least one cell known to be non-cancerous whereby a difference in said expression indicates that said cell is cancerous.

[0078] In a particular embodiment, the present invention is directed to a process for determining the cancerous status of a cell to be tested, comprising determining the presence in said cell of at least one gene that includes one of the nucleotide sequences selected from the sequences of SEQ ID NO: 1-568, including sequences having substantial identity homologous to said sequences, or characteristic fragments thereof, or the complements of any of the foregoing and then comparing the pattern of said gene presence and/or absence with that found for a cell known, or believed, to be non-cancerous, or normal, at least with respect to its genetic complement.

[0079] With respect to genes that correspond to at least one of the sequences of SEQ ID NO: 1-314, up regulation of expression in cancer cells (as compared to non-cancer cells, which may lack said genes, or said gene expression, altogether) is indicative of a cancerous, or potentially cancerous, condition.

[0080] In specific embodiments, the present invention relates to embodiments wherein the genetic pattern is the modulation of expression of more than one gene, preferably 3, 4, or 5 genes, and even includes patterns where there is a modulation of expression of as many as 10, or more, genes. Thus, where a genetic pattern is the modulation of expression of 5 genes in a cancerous cell as compared to a non-cancerous cell from the same tissue type, such as a cancerous stomach cell, versus a non-cancerous cell of stomach, such a pattern indicates a likelihood that such genes (i.e., the modulation of expression of those 5 genes) is an indicator of cancerous status and thereby provides a means of diagnosing a cancerous, or potentially cancerous, status. The absence of a specific set of genes from cancerous cells where said genes are present in otherwise normal cells, especially those of a similar type, is also indicative of a correlation with the cancerous state and thus can likewise be used as a means of diagnosing the cancerous state in other cells suspected of being cancerous.

[0081] In a particular embodiment, the gene sequences as disclosed herein are indicative of the cancerous or normal state of stomach tissues. This further includes SEQ ID NO: 1-568 for stomach, wherein SEQ ID NO: 1-314 represent genes or gene sequences expressed in stomach cancer but not in normal stomach from the same patients and wherein SEQ ID NO: 315-568 represent, or correspond to, genes or gene sequences expressed in normal stomach but not in stomach cancer samples from the same patients.

[0082] The gene patterns indicative of a cancerous state need not be characteristic of every cell found to be cancerous. Thus, the methods disclosed herein are useful for detecting the presence of a cancerous condition within a tissue where less than all cells exhibit the complete pattern. For example, a set of selected genes, comprising sequences homologous under stringent conditions (i.e., at least 95% identical) to at least one of the sequences of SEQ ID NO: 1-314, and wherein the signature set is comprised of genes expressed and/or up-regulated in cancer cells relative to normal cells, as disclosed above for the signature gene sets used for practicing the invention, may be found, using appropriate probes, either DNA or RNA, to be present in as little as 60% of cells derived from a sample of tumorous, or malignant, tissue while being absent from as much as 60% of cells derived from corresponding non-cancerous, or otherwise normal, tissue (and thus being present in as much as 40% of such normal tissue cells). In a preferred embodiment, such gene pattern is found to be present in at least 70% of cells drawn from a cancerous tissue and absent from at least 70% of a corresponding normal, non-cancerous, tissue sample. In an especially preferred embodiment, such gene pattern is found to be present in at least 80% of cells drawn from a cancerous tissue and absent from at least 80% of a corresponding normal, non-cancerous, tissue sample. In a most preferred embodiment, such gene pattern is found to be present in at least 90% of cells drawn from a cancerous tissue and absent from at least 90% of a corresponding normal, non-cancerous, tissue sample. In an additional embodiment, such gene pattern is found to be present in at least 100% of cells drawn from a cancerous tissue and absent from at least 100% of a corresponding normal, non-cancerous, tissue sample, although the latter embodiment may represent a rare occurrence.

[0083] Conversely, where the signature set (such as SEQ ID NO: 315-568) is expressed or up-regulated in normal cells versus cancerous cells, as disclosed herein, expression in the normal cells but not in suspected cancerous cells may confirm a cancerous state in the suspected cancerous sample. The same is true for assays disclosed herein for potential antitumor agents.

[0084] Although the presence or absence of expression of one or more selected gene sequences may be indicative of a cancerous status for a given cell, the mere presence or absence of such a gene pattern may not alone be sufficient to achieve a malignant condition and thus the level of expression of such gene pattern may also be a significant factor in determining the attainment of a cancerous state. While a pattern of gene expression may be present in both cancerous and non-cancerous cells, the relative level of expression, as determined by any of the methods disclosed herein, all of which are well known in the art, may differ between the cancerous versus the non-cancerous cells. Thus, it becomes essential to also determine the level of expression of one or more of said genes as a separate means of diagnosing the presence of a cancerous status for a given cell, groups of cells, or tissues, either in culture or in situ.

[0085] In accordance with the invention disclosed herein, a determination of an anticancer agent using the signature gene sets for stomach described herein is based on patterns of modulation of such genes so that increase or decrease in expression of a gene due to the presence of such a potential agent may or may not be meaningful. Thus, the more genes in a gene set that are affected by said agent the more likely said agent is an effective therapeutic agent.

[0086] In addition, different agents may have different abilities to affect the genes of a signature gene set. For example, if a potential therapeutic agent, say, agent A, causes a gene or group of genes of a characteristic or signature gene set, or even all of the genes of said gene set, to exhibit decreased expression, such as where a lower amount of mRNA is expressed from said gene(s), or less protein is produced from said mRNA, but a second potential agent, say, agent B, while modulating the activity of the same or related genes causes said expression to be reduced to half, such as where only half as much mRNA is transcribed or only half as much protein is translated from said mRNA as for agent A, then agent B is considered to have twice as much therapeutic potential as agent A.

[0087] Such modulation or change of activity as determined using the assays disclosed herein may include either an increase or a decrease in activity of said genes or gene sequences. Thus, where a gene is expressed in cancer cells but not in normal cells, or is up-regulated in cancer cells relative to normal cells, of the same organ or tissue type, an agent that down-regulates said gene or genes, or gene sequences, or prevents their expression entirely, is considered a potential antitumor agent within the present disclosure. Conversely, where an agent causes expression of a gene or genes, or gene sequences, expressed in normal cells but not in cancer cells, or where said agent up-regulates a gene or genes, or gene sequences, that are expressed in normal cells but not in cancer cells, or are up-regulated in normal cells but not in cancer cells, of the same organ or tissue type, said agent is considered to be a potential antitumor agent within the present disclosure.

[0088] The present invention also relates to a process that comprises a method for producing a product comprising identifying an agent according to one of the disclosed processes for identifying such an agent (such as the anti-neoplastic agents identified according to the assay procedures disclosed herein) wherein said product is the data collected with respect to said agent as a result of said identification process, or assay, and wherein said data is sufficient to convey the chemical character and/or structure and/or properties of said agent. For example, the present invention specifically contemplates a situation whereby a user of an assay of the invention may use the assay to screen for compounds having the desired enzyme modulating activity and, having identified the compound, then conveys that information (i.e., information as to structure, dosage, etc) to another user who then utilizes the information to reproduce the agent and administer it for therapeutic or research purposes according to the invention. For example, the user of the assay (user 1) may screen a number of test compounds without knowing the structure or identity of the compounds (such as where a number of code numbers are used the first user is simply given samples labeled with said code numbers) and, after performing the screening process, using one or more assay processes of the present invention, then imparts to a second user (user 2), verbally or in writing or some equivalent fashion, sufficient information to identify the compounds having a particular modulating activity (for example, the code number with the corresponding results). This transmission of information from user 1 to user 2 is specifically contemplated by the present invention.

[0089] In accordance with the foregoing, the present invention further relates to a process for determining the cancerous status of a cell to be tested, comprising determining the level of expression in said cell of at least one gene that includes one of the nucleotide sequences selected from the sequences of SEQ ID NO: 1-568, including sequences substantially identical to said sequences, or characteristic fragments thereof, or the complements of any of the foregoing and then comparing said expression to that of a cell known to be non-cancerous whereby the difference in said expression indicates that said cell to be tested is cancerous.

[0090] In specific embodiments of the present invention, said expression is determined for more than one of said genes, such as 2, 3, 4, 5, or more such 25 genes, considered as a set, and even as many as a set of 10 such genes. A set of genes, for example, 5 such genes, may be found to be expressed at certain levels in cancer cells but are found to be expressed at lower levels (or not expressed at all) in non-cancerous, or normal, cells. Conversely, a set of, for example, 5 such genes may be found to be expressed in normal (i.e., non-cancerous) cells but expressed at lower levels (or not expressed at all) in cancer cells. Thus, by determining the set or pattern of genes expressed in cancer cells but expressed at lower levels (or not at all) in non-cancer, or vice versa, a method is achieved for diagnosing cancerous conditions wherein said genes are selected from those that include one of the sequences, or fragments of sequences, including complementary sequences, selected from SEQ ID NO: 1-568. Using the methods disclosed herein, stomach or other cancers can be readily detected using the methods of the present invention.

[0091] In accordance with the invention, although gene expression for a gene that includes as a portion thereof one of the nucleotide sequences of SEQ ID NO: 1-568, is preferably determined by use of a probe that is a fragment of such nucleotide sequence, it is to be understood that the probe may be formed from a different portion of the gene. Thus, for each gene of the signature set of the present invention, the nucleotide sequence disclosed with respect to a specific sequence ID number may be only a portion of the nucleotide sequence that encodes expression of the gene. As a result, expression of the gene may be determined by use of a nucleotide probe that hybridizes to messenger RNA (mRNA) transcribed from a portion of the gene other than the specific nucleotide sequence disclosed with reference to a sequence ID number as recited herein.

[0092] The present invention further relates to a process for determining a cancer initiating, facilitating or suppressing gene comprising the steps of contacting a cell with a cancer modulating agent and determining a change in expression of a gene selected from the group consisting of the gene sequences of SEQ ID NO: 1-568 and thereby identifying said gene as being a cancer initiating or facilitating gene.

[0093] Thus, some or all of the genes within the signature gene sets disclosed herein as SEQ ID NO: 1-568 are found to play a direct role in the initiation or progression of cancer or even other diseases and disease processes. Because changes in expression of these genes (either up-regulation or down-regulation) are linked to the disease state (i.e. cancer), the change in expression may contribute to the initiation or progression of the disease. For example, if a gene that is up-regulated is an oncogene, or if a gene that is down-regulated is a tumor suppressor, such a gene provides for a means of screening for small molecule therapeutics beyond screens based upon expression output alone. For example, genes that display up-regulation in cancer and whose elevated expression contributes to initiation or progression of disease represent targets in screens for small molecules that inhibit or block their function. Examples include, but are not be limited to, kinase inhibition, cellular proliferation, substrate analogs that block the active site of protein targets, etc. Similarly, genes that display down-regulation in cancer and whose absence results in initiation or progression of disease are valuable therapeutics for gene therapy.

[0094] In accordance therewith, the present invention relates to a process for determining a cancer initiating or facilitating gene comprising contacting a cell expressing a test gene (one whose status as a cancer initiating or facilitating gene is to be determined) with an agent that decreases the expression of a gene corresponding to a polynucleotide having a sequence selected from the group consisting of SEQ ID NO: 1-314 and detecting a decrease in expression of said test gene compared to when said agent is not present, thereby identifying said test gene as being a cancer initiating or facilitating gene. Such genes may, of course, be oncogenes and said decrease in expression may be due to a decrease in copy number of said gene in said cell or a cell derived from said cell, such as where copy number is reduced following cellular replication.

[0095] The present invention also relates to a process for determining a cancer suppressor gene comprising contacting a cell expressing a test gene (one whose status as a cancer suppressor gene is to be determined) with an agent that increases the expression of a gene that encodes an RNA at least 95% identical to an RNA encoded by (i.e., corresponds to) a polynucleotide having a sequence selected from the group consisting of SEQ ID NO: 315-568 and detecting an increase in expression of said test gene compared to when said agent is not present, thereby identifying said test gene as being a cancer suppressor gene. The sequence identity may include identical sequences, as defined herein, and such a process includes embodiments wherein the increase in expression is due to an increase in copy number of the gene in said cell or a cell derived from said cell, such as by cellular replication.

[0096] It should be noted that there are a variety of different contexts in which genes have been evaluated as being involved in the cancerous process. Thus, some genes may be oncogenes and encode proteins that are directly involved in the cancerous process and thereby promote the occurrence of cancer in an animal. In addition, other genes may serve to suppress the cancerous state in a given cell or cell type and thereby work against a cancerous condition forming in an animal. Other genes may simply be involved either directly or indirectly in the cancerous process or condition and may serve in an ancillary capacity with respect to the cancerous state. All such types of genes are deemed with those to be determined in accordance with the invention as disclosed herein. Thus, the gene determined by said process of the invention may be an oncogene, or the gene determined by said process may be a cancer facilitating gene, the latter including a gene that directly or indirectly affects the cancerous process, either in the promotion of a cancerous condition or in facilitating the progress of cancerous growth or otherwise modulating the growth of cancer cells, either in vivo or ex vivo. In addition, the gene determined by said process may be a cancer suppressor gene, which gene works either directly or indirectly to suppress the initiation or progress of a cancerous condition. Such genes may work indirectly where their expression alters the activity of some other gene or gene expression product that is itself directly involved in initiating or facilitating the progress of a cancerous condition. For example, a gene that encodes a polypeptide, either wild or mutant in type, which polypeptide acts to suppress of tumor suppressor gene, or its expression product, will thereby act indirectly to promote tumor growth.

[0097] In accordance with the foregoing, the process of the present invention includes cancer modulating agents that are themselves either polypeptides, or small chemical entities, that affect the cancerous process, including initiation, suppression or facilitation of tumor growth, either in vivo or ex vivo. Said cancer modulating agent may have the effect of increasing gene expression or said cancer modulating agent may have the effect of decreasing gene expression as such terms have been described herein.

[0098] In keeping with the present disclosure, the present invention also relates to a process for treating cancer comprising contacting a cancerous cell with an agent having activity against an expression product encoded by a gene sequence selected from the group consisting of SEQ ID NO: 1-568. More specifically, the present invention relates to a process for treating cancer comprising contacting a cancerous cell with an agent having activity against an expression product encoded by a gene sequence selected from the group consisting of SEQ ID NO: 1-314. Such a process includes an embodiment wherein the cancerous cell is contacted in vivo The agent may include an antibody that reacts with a polypeptide encoded by such a gene.

[0099] Thus, some or all of the genes within these signature gene sets represent individual targets for therapeutic intervention, based at least in part on their pattern(s) of expression. For example, genes within the signature gene sets that encode cell surface molecules and are up-regulated in cancer as compared to normal cells. The proteins encoded by such genes, due to their elevated expression in cancer cells, represent highly useful therapeutic targets for “targeted therapies” utilizing such affinity structures as, for example, antibodies coupled to some cytotoxic agent. In such methodology, it is advantageous that nothing need be known about the endogenous ligands or binding partners for such cell surface molecules. Rather, an antibody or equivalent molecule that can specifically recognize the cell surface molecule (which could include an artificial peptide, a surrogate ligand, and the like) that is coupled to some agent that can induce cell death or a block in cell cycling offers therapeutic promise against these proteins. Thus, such approaches include the use of so-called suicide “bullets” against intracellular proteins

[0100] The process of the present invention includes embodiments of the above-recited process wherein said cancer cell is contacted in vivo as well as ex vivo, preferably wherein said agent comprises a portion, or is part of an overall molecular structure, having affinity for said expression product. In one such embodiment, said portion having affinity for said expression product is an antibody, especially where said expression product is a polypeptide or oligopeptide or comprises an oligopeptide portion, or comprises a polypeptide.

[0101] Such an agent can therefore be a single molecular structure, comprising both affinity portion and anti-cancer activity portions, wherein said portions are derived from separate molecules, or molecular structures, possessing such activity when separated and wherein such agent has been formed by combining said portions into one larger molecular structure, such as where said portions are combined into the form of an adduct. Said anti-cancer and affinity portions may be joined covalently, such as in the form of a single polypeptide, or polypeptide-like, structure or may be joined non-covalently, such as by hydrophobic or electrostatic interactions, such structures having been formed by means well known in the chemical arts. Alternatively, the anti-cancer and affinity portions may be formed from separate domains of a single molecule that exhibits, as part of the same chemical structure, more than one activity wherein one of the activities is against cancer cells, or tumor formation or growth, and the other activity is affinity for an expression product produced by expression of genes related to the cancerous process or condition.

[0102] In one embodiment of the present invention, a chemical agent, such as a protein or other polypeptide, is joined to an agent, such as an antibody, having affinity for an expression product of a cancerous cell, such as a polypeptide or protein encoded by a gene related to the cancerous process, especially a gene sequence corresponding to one selected from the group consisting of the sequences of SEQ ID NO: 1-314. In a specific embodiment, said expression product is a cell surface receptor, such as a protein or glycoprotein or lipoprotein, present on the surface of a cancer cell, such as where it is part of the plasma membrane of said cancer cell, and acts as a therapeutic target for the affinity portion of said anticancer agent and where, after binding of the affinity portion of such agent to the expression product, the anti-cancer portion of said agent acts against said expression product so as to neutralize its effects in initiating, facilitating or promoting tumor formation and/or growth. In a separate embodiment of the present invention, binding of the agent to said expression product may, without more, have the effect of deterring cancer promotion, facilitation or growth, especially where the presence of said expression product is related, either intimately or only in an ancillary manner, to the development and growth of a tumor. Thus, where the presence of said expression product is essential to tumor initiation and/or growth, binding of said agent to said expression product will have the effect of negating said tumor promoting activity. In one such embodiment, said agent is an apoptosis-inducing agent that induces cell suicide, thereby killing the cancer cell and halting tumor growth.

[0103] In alternative embodiments of the foregoing, the present invention relates to a process for treating a cancerous condition in an animal afflicted therewith comprising administering to said animal a therapeutically effective amount of an agent first identified as having anti-neoplastic activity using an assay process as disclosed herein according to the present invention, such as a cancer-related gene modulator as identified according to the processes of the invention. Such processes also include the ability to protect against development of a cancerous state by using agents identified by the assay processes of the invention. Thus, the present invention specifically contemplates a process for protecting an animal against cancer comprising administering to an animal at risk of developing cancer a therapeutically effective amount of an agent first identified as having anti-neoplastic activity using one or more of the assay processes disclosed herein for identifying such agents.

[0104] The processes of the present invention take advantage of the correlation of changes in mRNA expression profiles of these signature gene sets with potential (depending on the form of cancer) changes in DNA copy number of the chromosomal regions wherein these genes are located. Of course, the precise nature of the change in mRNA expression (e.g. a signature set of genes that are up-regulated at the transcriptional level) may also indicate a change in the DNA copy number for the genomic regions in which these genes are located (e.g. an amplification of the genomic DNA region that contains the involved gene or genes).

[0105] Many cancers contain chromosomal rearrangements, which typically represent translocations, amplifications, or deletions of specific regions of genomic DNA. A recurrent chromosomal rearrangement that is associated with a specific stage and type of cancer always affects a gene (or possibly genes) that play a direct and critical role in the initiation or progression of the disease. Many of the known oncogenes or tumor suppressor genes that play direct roles in cancer have either been initially identified based upon their positional cloning from a recurrent chromosomal rearrangement or have been demonstrated to fall within a rearrangement subsequent to their cloning by other methods. In all cases, such genes display amplification at both the level of DNA copy number and at the level of transcriptional expression at the mRNA level.

[0106] At least some of the genes that are contained within signature gene sets disclosed herein (SEQ ID NO: 1-314) display changes in their mRNA expression profiles (depending on the precise reading frame involved) within cancer samples due, in part, to changes in their DNA copy number as a result of specific chromosomal rearrangements in those cancer cells. The utilities that follow from this are (i) that the genes contained within these signature gene sets offer a time saving shortcut to the identification of novel chromosomal rearrangements, amplifications, or deletions that are associated with cancer, and/or (ii) represent key genes affected by such chromosomal rearrangements, amplifications, or deletions and, therefore, play a key role in the initiation or progression of the disease. Genes within the signature sets that identify changes in the DNA copy number (based upon their changes in expression at the mRNA level) afford an entry point into other forms of diagnostic assay for the initiation, staging, or progression of cancer to be conducted in tissue samples at the DNA level (e.g. if gene X identifies a novel chromosomal amplification associated with cancer, then that specific chromosomal region defined by gene X would serve as the basis for a diagnostic assay for cancer, where genomic DNA is extracted from tissue samples and evaluated for the presence of the specific amplification), and also the rapid positional cloning of genes that play vital and direct roles in the initiation or progression of cancer.

[0107] In one embodiment of the present invention, said change in expression may be determined by determining a change in gene copy number, wherein said change in copy number is an increase in copy number or wherein said change in copy number is a decrease in copy number.

[0108] A change in gene copy number may be determined by determining a change in expression of messenger RNA encoded by a particular gene sequence, especially where said sequence is one selected from the group consisting of the sequences of SEQ ID NO: 1-568, especially SEQ ID NO: 1-314. Also in accordance with the present invention, said gene may be a cancer initiating gene, a cancer facilitating gene, or a cancer suppressing gene. In carrying out the methods of the present invention, a cancer facilitating gene is a gene that, while not directly initiating or suppressing tumor formation or growth, said gene acts, such as through the actions of its expression product, to direct, enhance, or otherwise facilitate the progress of the cancerous condition, including where such gene acts against genes, or gene expression products, that would otherwise have the effect of decreasing tumor formation and/or growth.

[0109] The present invention also relates to a process for treating cancer comprising inserting into a cancerous cell a gene construct comprising an anti-cancer gene operably linked to a promoter or enhancer element such that expression of said anti-cancer gene causes suppression of said cancer and wherein said promoter or enhancer element is a promoter or enhancer element modulating a gene sequence selected from the group consisting of the sequences of SEQ ID NO: 315-568.

[0110] The signature sets or signature gene sets disclosed herein are useful in identifying genetic regulatory elements within the promoters of the genes contained within the signature sets that are specific to normal tissue and/or the corresponding cancer. Each signature set is a collection of genes that share a gross common pattern of transcriptional regulation in cancer vs. normal (e.g. a signature set of genes that are transcriptionally up-regulated in cancer).

[0111] In one such embodiment, analyzing and comparing the DNA sequences of the promoter regions of all the genes contained within the signature set serves to identify conserved stretches or motifs of sequences within subsets of genes that represent cis-acting elements that specifically drive a form of gene expression (e.g. increased transcriptional expression in cancer). The identification of such cis-acting regulatory elements is then available for use in driving the cancer-specific expression of suicide genes or toxins via genetic therapy using technology already well known in the art.

[0112] In separate embodiments, said anti-cancer gene is a cancer suppressor gene or encodes a polypeptide having anticancer activity, especially where said polypeptide has apoptotic activity.

[0113] In additional embodiments, such insertion of the gene construct into a cancerous cell is accomplished in vivo, for example using a viral or plasmid vector. Such methods can also be applied to in vitro uses. The methods of the present invention are readily applicable to different forms of gene therapy, either where cells are genetically modified ex vivo and then administered to a host or where the gene modification is conducted in vivo using any of a number of suitable methods involving vectors especially suitable to such therapies, such as the use of special viral vectors, including adeno-associated viruses and adenoviruses, as well as retroviruses and specially constructed plasmids to accomplish such therapies. The use of these and other vectors is well known to those skilled in the art and need not be described further.

[0114] The present method also relates to a process for determining functionally related genes comprising contacting one or more gene sequences selected from the group consisting of the sequences of SEQ ID NO: 1-568 with an agent that modulates expression of more than one gene in such group and thereby determining a subset of genes of said group.

[0115] In accordance with the present invention, said functionally related genes are genes modulating the same metabolic pathway or said genes are genes encoding functionally related polypeptides. In one such embodiment, said genes are genes whose expression is modulated by the same transcriptional activator or enhancer sequence, especially where said transcriptional activator or enhancer increases, or otherwise modulates, the activity of a gene sequence selected from the group consisting of SEQ ID NO: 1-568. In specific embodiments, the sequences may be SEQ ID NO: 1-314 or may be SEQ ID NO: 315-568, or subsets thereof.

[0116] In one such embodiment, small molecule screens serve to identify changes in expression of genes within a signature set and thereby provide a tool for the identification of specific functional pathways and a means of assigning defined functions to novel genes.

[0117] In situations where a signature set of genes that are transcriptionally up-regulated in cancer cells compared to normal cells, such screens facilitate the identification of small molecules that down-regulate the expression of the genes of the signature set within cancer cells. While such therapeutics make a cancer cell “look” more normal, based upon the expression of the genes within the signature set, what actually happens when such screens are put into practice is that all genes within the signature sets do not respond identically to each small molecule within a chemical compound library. If an average signature set contains 200 different genes, for example, and the expression of all 200 genes is monitored in response to a library of some 50,000 chemical compounds, and subsets of genes within the signature set consistently change their patterns of expression in response to particular chemicals (e.g., 10 of the genes always change expression in a coordinated way, such as down-regulation of one gene within the group of 10) then it always causes the down-regulation of the other 9 specific genes as well.

[0118] Such subsets or subgroups of genes within each signature set that change their expression in a coordinated way in response to chemical compounds represent genes that are located within a common metabolic, signaling, physiological, or functional pathway so that by analyzing and identifying such subsets one can (a) assign known genes and novel genes to specific pathways and (b) identify specific functions and functional roles for novel genes that are grouped into pathways with genes for which their functions are already characterized or described. For example, one might identify a subgroup of 10 genes within a signature set (5 known genes and 5 novel genes) that change expression in a coordinated fashion and for which the 5 known genes are involved in apoptosis thereby implicating the other 5 novel genes as playing a role in apoptotic cellular processes. Therefore, the processes disclosed according to the present invention at once provide a novel means of assigning function to genes, i.e. a novel method of functional genomics, and a means for identifying chemical compounds that have potential therapeutic effects on specific cellular pathways. Such chemical compounds may have therapeutic relevance to a variety of diseases outside of cancer as well, in cases where such diseases are known or are demonstrated to involve the specific cellular pathway that is affected.

[0119] It should be cautioned that, in carrying out the procedures of the present invention as disclosed herein, any reference to particular buffers, media, reagents, cells, culture conditions and the like are not intended to be limiting, but are to be read so as to include all related materials that one of ordinary skill in the art would recognize as being of interest or value in the particular context in which that discussion is presented. For example, it is often possible to substitute one buffer system or culture medium for another and still achieve similar, if not identical, results. Those of skill in the art will have sufficient knowledge of such systems and methodologies so as to be able, without undue experimentation, to make substitutions that will optimally serve their purposes in using the methods and procedures disclosed herein.

[0120] The present invention will now be further described by way of the following non-limiting example but it should be kept clearly in mind that other and different embodiments of the methods disclosed according to the present invention will no doubt suggest themselves to those of skill in the relevant art.

### EXAMPLE

[0121] SW480 cells (or other sells of choice, cancerous or normal, such as stomach cancer cells or cell lines) are grown to a density of 10⁵ cells/cm² in Leibovitz's L-15 medium supplemented with 2 mM L-glutamine (90%) and 10% fetal bovine serum. The cells are collected after treatment with 0.25% trypsin, 0.02% EDTA at 37° C. for 2 to 5 minutes. The trypsinized cells are then diluted with 30 ml growth medium and plated at a density of 50,000 cells per well in a 96 well plate (200 μl/well). The following day, cells are treated with either compound buffer alone, or compound buffer containing a chemical agent to be tested, for 24 hours. The media is then removed, the cells lysed and the RNA recovered using the RNAeasy reagents and protocol obtained from Qiagen. RNA is quantitated and 10 ng of sample in 1 μl are added to 24 μl of Taqman reaction mix containing 1× PCR buffer, RNAsin, reverse transcriptase, nucleoside triphosphates, amplitaq gold, tween 20, glycerol, bovine serum albumin (BSA) and specific PCR primers and probes for a reference gene (18S RNA) and a test gene (Gene X). Reverse transcription is then carried out at 48° C. for 30 minutes. The sample is then applied to a Perkin Elmer 7700 sequence detector and heat denatured for 10 minutes at 95° C. Amplification is performed through 40 cycles using 15 seconds annealing at 60° C. followed by a 60 second extension at 72° C. and 30 second denaturation at 95° C. Data files are then captured and the data analyzed with the appropriate baseline windows and thresholds.

[0122] The quantitative difference between the target and reference genes is then calculated and a relative expression value determined for all of the samples used. This procedure is then repeated for each of the target genes in a given signature, or characteristic, set and the relative expression ratios for each pair of genes is determined (i.e., a ratio of expression is determined for each target gene versus each of the other genes for which expression is measured, where each gene's absolute expression is determined relative to the reference gene for each compound, or chemical agent, to be screened). The samples are then scored and ranked according to the degree of alteration of the expression profile in the treated samples relative to the control. The overall expression of the set of genes relative to the controls, as modulated by one chemical agent relative to another, is also ascertained. Chemical agents having the most effect on a given gene, or set of genes, are considered the most anti-neoplastic.

[0123] In carrying out the methods of the invention, it is to be expected that not all cells of a given sample of suspected cancerous cells will express all, or even most, of these genes but that a substantial expression thereof in a substantial number of such cells is sufficient to warrant a determination of a cancerous, or potentially cancerous, condition. The sequences disclosed herein are represented by SEQ ID NO: 1 to 568 although different genes are more or less relevant to different organs and tissues and some may be up-regulated in cancer and not normal cells while others are up-regulated in normal cells but not cancerous cells. The sequences presented herein may be genomic, synthetic or cDNA sequences and may also be represented as RNA sequences. The sequences of the sequence listing herein are mostly cDNA sequences but can be used to locate genomic sequences.

The application's sequence listing, which the Patent Office published only in electronic form, follows.

SEQUENCE LISTING (568 sequences)

SEQ ID NO: 1 - DNA, 432 bp, Homo sapiens
  misc_feature: n=a,t,g or c
aacacactgaatattccgtgtgatctagaacagtgtggcagctttcacagcacaggaccgttcatcgggggcctaaacgtttccctcggctctgtcaccaactcacttctctcggcttcgttgtctgtaaattggatgaaaagagctctaatgcctttcaggctcttagaagccatagatttggacaagcccagcaagatgggtgtccttccaggcctcttcccctttcctccatctctggcaacagttcttggggtttggcaattgtttggantttttttccttcngcacnttgtgtgtangtgtgnttgtgtnaagaaaaacacgactcngtccaggtagaaatggtnaaggaagggggaagagaattacatttccagggtcagaaacttggcaacagttttcccagagtgnctcagncacaccaccgta

SEQ ID NO: 2 - DNA, 571 bp, Homo sapiens
  misc_feature: n=a,t,g or c
tntgctgaggcgtgagaatggcgtcccgnggccggcgtccggagcatggcggacccccagagctgttttatgacgagacagaagcccggaaatacgttcgcaactcacggatgattgatatccagaccaggatggctgggcgagcattggagcttctttatctgccagagaataagccctgttacctgctggatattggctgtggcactgggctgagtggaagttatctgtcagatgaagggcactattgggtgggcctggatatcagccctgccatgctggatgaggctgtggaccgagagatagagggagacctgctgctgggggatatgggccagggcatcccattcaagccaggcacatttgatggttgcatcagcatttctgctgtgcagtggctctgtaatgctaacaagaagtctgaaaacccctgccaagcgcctgtactgcttttttgcttctcttttttctgttctcgtccggggatccgagctgtctgcagctgtaccctgagaactcagagcagttggaactgatcacaacccaggccanaaaggcaggttctcccggt

SEQ ID NO: 3 - DNA, 585 bp, Homo sapiens
  misc_feature: n=a,t,g or c
ctgatctctccagaatgatcagcccagaggaatgctgagaaatcacctggaggagggagcagaaagagaaggtttttaaggaggggcttctgaatacttgggagatacggaacggaccaaggaccacactccagggtgcattcgttgctccctggggcaccacttctggattacagtgtgccaggtcctttggaggccctaccccttccccattcattgccaccagtgagaaatgggggtgcccctgtgtaaagaaacctaccaaaggtttacatttgcaccttagcctcaatagctacgaaccctagagaagcagctagctggagctcatgtgcaactcctgattctcaggagaaagatggattttaacccaaaattatgagtgagctgttaactctaaaatgtacttgggagataggccaagcgagaggtcatgggccaactaagtgttatccagtagaagagacagtacactgcttttcttttaagtgtttgccttttcctttgctatatgttttgctattccttgtggcttagaatgtaaattgatngttaaaagttttggtctgaataatattatctntg

SEQ ID NO: 4 - DNA, 516 bp, Homo sapiens
  misc_feature: n=a,t,g or c
aaaaacctcacatgatggggaaacaaaaaaaagcaacaaagaagccacaccacacctccctggccaggcacagcgctgcccagagcggcacaccgggnacagcaccacacatgttccagaatctgaaatctcaaaagccattcactaacttaaaacaactcaacagagccatgaaacaaatgccctgatgaaaataagacaactgcatgttacatcatcggcactttatacattactgttaccatgaaaaagaaatgaacagcagcaccgtctgataccatcagctgggcagatgcattaaggttaaatctaagtgtcaagaaaaccctatttctttataatatttatgcagctgttaagggtaacatggtggcagcttcacaacaagaaccgtgatcatgcatgcagtcatgtctccagtattctgtgaaaagccaggatacgttaggatgtgagtttagaactgagtccattcggtgcatggnaatccaccgcggagtnacacaatgctcctna

SEQ ID NO: 5 - DNA, 435 bp, Homo sapiens
aaatattttatagtataatgctatccaaactcatttttaaaaacattttattatggaaattttcacaaatgcacaaaaagaatagcagaatgaagctctgtgtacccatcctccaacagctgtcctgtggtcagtcttgtttacctgcatccccacctatcccctgccccaacccacagggatcagtttgagtcccattaacaggcatagtattttcatgtttgtgtgatcagagacattcaaatataactccaaagatagggtacttttttgaacataaccacaataccattgtgtaagactgctaaaacattttttgatgccaagtaccagtcaatattcaaacttcctgattgtctcgtaagttttttttaacagttggtttattcgagtcaagatccaggcaagatctagatcttgcattttgttaatata

SEQ ID NO: 6 - DNA, 512 bp, Homo sapiens
gtaaatacctgttctctttcaatggactgttgcctattgagcattgtggatgatgtgttttcagatttccaggtgaagttctgaccctacctgtttggccaaagacgtaaattgagaggaaaggccttggtcttcctgatcaaccagcatttaacgaacagtggcttaatgcagatcactcaagaggcagcatagcaatgtaaaaggaatataagtaggtgttggatgcctttttcctagaccaggaatggggaatatataacacctgtgccaccgctcttttaaggaggcattatgaatgagtgcagcattcctgtcctctgtgccaggatttggtcttagaatccatgtcagattggtgcttccagacatctattcccagtccatcagagtgaaatgaaggctatttgccatccctgccttagacagaggagtgaaagaattaagtgggtagacaccaaccaaaatgactttgaaagcagtgagctgattgagctccagttctgtgggta

SEQ ID NO: 7 - DNA, 540 bp, Homo sapiens
tttttttttttggggagacgaatcccttactagcagagctgtattgagggttaacggtggtaatgggtctccagggcttggtgcagtttgtactcaacaagtacgtaattctctcctttggttgcccctgaatacaagagtggtcttgtacttccctgcctgaacagtccacagccaatggcactccagtccttgtcacatggttccactcttaggatgtaaattaggaggtaccagcttgagaggcagaggcaaaggtaaggttaagatgcagctgtgaggctgggcacagtggctcacgcctataatcccagcaccttgccgggactgtttttactggaggagggggagaagacacacagtggggaaagcgttctttcaatatgcagatgcttcagggagaaccaaactatttcactggtattcccccgtaccaccggaactggtgcttggagcggaagggaagtgagaaaaagtagaaagtaatgagcctcctgtgtctctggaaggttctagggatagggtagagggaagaagaga

SEQ ID NO: 8 - DNA, 419 bp, Homo sapiens
  misc_feature: n=a,t,g or c
gggaccctgtgtaccatgtactgtatttaaaaaaaaaaaagttacctattgtcacacttgctgtgttaattaacaaaagatgttgtgtgcggtctcctgtatcggtgtggatccaacagctctccagggagtcacattgcatgggggttgagttgacggttcttgtgatatgtaaacccccgagaccaaacttgagggtttatttagggttttctgtttgtcctttgggtttttgtttcactttgttttggtgccgtttntccatttacagccaaatcagtttcatgatgttcaaaacatttactgatgtcaaatggaggaaaggaacagaaaaaaagatttttacaaagtaataaaatttaaaactgagctgtttaatgttgctgtttttanctgtctgttcttgtccaaaagtggga

SEQ ID NO: 9 - DNA, 490 bp, Homo sapiens
gaaggtcctccctaagagtctcctgacaaaagtatacttattgaacacctctatgtgccaggctctgtgttgggtactttgatcaatgcccctgtttcagtctcatctgtactcacggcagccctgtggagtacggtgtactggcccagcttacagatgcagaaagcgagacgttctgccatcagataaagtcacgtggctctttagtaacacggacaaggctcctcgccaaggaactcgtggcagaagagggcagcagttggcagtagctgccgatgtctgtccccagctccaccattcctccctgtggctgtgcatgctcgtggtttcagtgtccgtgtgtccatgtgtctgcccttcaggagctcgcagctggtgtgcttggcggtcccaggcctgtgtagtgtctctcccctgctgcgggcgcccccaccccgattcctctccccagaagcggtgggatgggccccatgaactgcagcagcatgct

SEQ ID NO: 10 - DNA, 415 bp, Homo sapiens
tattgctacaaggcaaatcaagaagacatcaggaaatcagatgcacaggaaataaaggaaagctgtgctttgtcattgaatcctaagttcttagctgctgatgcaagttgtcccccaaggccatcacaaagcagtggggcatgagctgtgtttcaggggccactaaataacagctggtactgaccccagaaaccgccttcatctccattcggaagcaggtgacacaccccttcagaaggtgccctgggttgccgagtgtcagaatatactcaggactccagaggtgtcacacgtggaactgacaggagacccgccaccgtggaggcagggggcaagaaactcaagaacgcatcaagagcaccagccctgggccagggaagacaggctcttcctgcagtttctcgtggacactgct

SEQ ID NO: 11 - DNA, 499 bp, Homo sapiens
ggatgtccaccactgggtttgtgccttgtcggcgctcttctactagtcagatatcgcttcgaaacttgccatcatccatccaatcccgactgtcgatggtgaaccaaatggaaccctcaggtcagagcggcctggcctgtgtgcagcacggcctgccttcctccagcagctccagccaaagcatcccagcctgcaaacatcacactctcgtgggctttcttgcgacagagggaggtcagagcagtgcactgatgcacagccaggcaacaccttaagtcctgccaacaattcacactccagaaaggcagaagtgatttacagagtccaaattgtggatcccagtcaaattctggaagggatcaacctgtctaaaaggaaagagctacagtggcctgatgaaggaatccggttaaaagctgggagaaatagctggaaagactggagtccgcagggagggcatggaaggcatgtgattcaccgatgggtccctgagcagaga

SEQ ID NO: 12 - DNA, 531 bp, Homo sapiens
  misc_feature: n=a,t,g or c
ggtgctggtgggttcacttttcaaggccagactaatacagttattttctataaaaatctggaagcaaagaatggtgattgtgagagcttacttggtagtatgtttttattaggagaataatgcaatatatatatgtaatgtcttttttattaagcatataagacaatatattgcatttatgagctcggcaggatctgttcttgtcatagccattgactatacatttgctactggtgattcatgttttaattttttattctcaggaaatttttaactctactgtatatgcatgtctatgcattttctgtgttatggaaatccactgatttttttttttttttcatatggtggtacttgcaatctgttttataattagtgctccattttaatcttatttataatttttattttaagcagctattgttacattaatggcctagtttaatantttgttgtctgattccataatgtacttaggttatgtaatcctctttgattttgttggcctgcatttccttgttaagaaaatgt

SEQ ID NO: 13 - DNA, 282 bp, Homo sapiens
tgatgggaactggtgctgagcctctgacgtcctgcccaagtgaacagctgcggcacgccctcccagcctacccctcctgcgctgccccagacctggaaggaggccgctatcagggtacactgggaacagagacccacctgagccaccctagccctcacccacctggggagtttactacctggggaccccccttgcccatgcctccagctacaaaacaattcaattgctttttttttttggtccaaaataaaacctcagctagctctgccaaaaaaaaaaaaa

SEQ ID NO: 14 - DNA, 379 bp, Homo sapiens
ggaggaggcccctgtgagcccactctggaacccttcctggaaccctccctactctgtccccctacagacaaccaagcactaatccccttagtaccaagaaaggggagccaggatttagtcctggcccagcccagagctgggacctggagcacgatctgttgacttccctgggtaggacactgccacctctgggctcaggtcctcatgcctccaaatggcatctagagtttgagcagccttcttggctgaggcaggcctagcctgtggagcgggctagggccaggagcatttggtgcccctccatgttgcaatgcaaacaccttcaccactggggcagtggggagagatggctatattaataaaataacgtgtgtctttc

SEQ ID NO: 15 - DNA, 459 bp, Homo sapiens
attcggcacgatgggtagccggagcgatctttggtttcatggccaccttcctctgcatggcaagcatatggctgtcctataagatctcgtgtgtaacccagtccacagatgcagccgtctgatgaggccacaacccctaggcccctcaggagctttgcagagaggaggacgtgtactccaggcgaggcctctggacctgtgttcctgtgccaaagtcctgtcaggctggtgggcaccaggaaaggcctgcaccctcttcctgctctcccaggaagccagctccctgagctcctgagccagccggaaactcttcctccagccttccggggagaacatccctcccattctgggaaaggaaagcagcctccagggaaatgttttctgccttcctgcttctagaaccacctcaggtactgatgaaccccacttagcacagctgaaggggtttgtgaatactcc

SEQ ID NO: 16 - DNA, 355 bp, Homo sapiens
aattcggcaccagggggctccgggtggctgctctgggactgggcacccacaagggctcagtgggcccaaacccttgaaatccgtgaaacagggtggtcccaagagctagaaactcaggaaaccccaggtgctcagggccccgcgtctcgggggctccgtggggcagacccctgctaatatatgcaattctccctcccccagcccttccctgacccctaagttattgcccgctcacctctcccaggccccaggctgcggactggcagggtggcgcctgcggtttctatgtatttatagcaagttctgatgtacatatgtaaaggacttttttaaatatatgtgccttttgcctact

SEQ ID NO: 17 - DNA, 427 bp, Homo sapiens
gcgagtgttctgagggaagcaaggaggcggcggcggcccaagcgagtggcgagtagtgaaacgttgcttctgaggggagcccaagatgacccgttctaacgagttcaagctgaaccagccacccgaggatggcatctcctccgtgaagttcagccccaacacctcccagttcctgcttgtctcctcctgggacacgtgccgtgcgtctctacgatgtgccggccaactccatgcggctcaagtaccagcacaccggcgccgtcctggactgcgccttctacgatccaacgcatgcctgagtggaggactagatcatcaattgaaaatgcatgatttgaacactgatcagaaaatcttgttgggacccacgatgcccctatcagatgtgttgaatactgtccagagtgaatgtgatggtcactgaggt

SEQ ID NO: 18 - DNA, 465 bp, Homo sapiens
cttttggagtctgaggaccgccccgcagaggactccgaggatgaggtccttgctgagcttcgcaaacggcaggctgagctgaaggacttagtcgcacaaccgcaccaagaagcacgacctgctgaggctggcaaaggaggaggtgaccggcagagctgaggcagcgggtgccatggctgacaacgaggtcatggacgcctttcgcaagatcatggctgcccggcagaagaagcggactcccaccaagaaagaaaaggaccaggcctggaagactctgaaggagcgtgagagcatcctgaagctgctggatgggtagccctcacccctgcctcaggtgattatctggcctagtggttgggaagggaggcccacttccttctttgggcacaggaaacattggcctgtgctgtccctcaaatggcggcagtctctaaagggccgtggcttcccctgaggtcttttggc

SEQ ID NO: 19 - DNA, 369 bp, Homo sapiens
ggtccctcagcaaccccaggcgtgggtttgaggagacaggtgatttacatcccctttgctgtcctcccccggtaccaaggcagggagcctccggagaccggccctgctggccacgcaggggcagactccagcctgtttccccagccctgcaggtcttccttctgtgggaagcttcctagcaagatggcttggagtcctggtccccctcctccctggccctctcgttcgtttctgtttctgtttacacgttggagtggggtcctccgtgggcggcggcgccctgccccgggtgtcgtccggcctcttgtgctcgagcccctttccgagttggactcgaccatccctcaccccaccaaggaccacactgtg

SEQ ID NO: 20 - DNA, 1522 bp, Homo sapiens
cgcgggggagaagcgggagcgggagcgggagcgagctggcggcgccgtcgggcgccgggccgggccatggagctgtggccgtgtctggccgcggcgctgctgttgctgctgctgctggtgcagctgagccgcgcggccgagttctacgccaaggtcgccctgtactgcgcgctgtgcttcacggtgtccgccgtggcctcgctcgtctgcctgctgcgccacggcggccggacggtggagaacatgagcatcatcggctggttcgtgcgaagcttcaagtacttttacgggctccgcttcgaggtgcgggacccgcgcaggctgcaggaggcccgtccctgtgtcatcgtctccaaccaccagagcatcctggacatgatgggcctcatggaggtccttccggagcgctgcgtgcagatcgccaagcgggagctgctcttcctggggcccgtgggcctcatcatgtacctcgggggcgtcttcttcatcaaccggcagcgctctagcactgccatgacagtgatggccgacctgggcgagcgcatggtcagggagaacctcaaagtgtggatctatcccgagggtactcgcaacgacaatggggacctgctgccttttaagaagggcgccttctacctggcagtccaggcacaggtgcccatcgtccccgtggtgtactcttccttctcctccttctacaacaccaagaagaagttcttcacttcaggaacagtcacagtgcaggtgctggaagccatccccaccagcggcctcactgcggcggacgtccctgcgctcgtggacacctgccaccgggccatgaggaccaccttcctccacatctccaagaccccccaggagaacggggccactgcggggtctggcgtgcagccggcccagtagcccagaccacggcagggcatgacctggggagggcaggtggaagccgatggctggaggatgggcagaggggactcctcccggcttccaaataccactctgtccggctcccccagctctcactcagcccgggaagcaggaagccccttctgtcactggtctcagacacaggcccctggtgtcccctgcagggggctcagctggaccctccccgggctcgagggcagggactcgcgcccacggcacctctgggagctgggatgataaagatgaggcttgcggctgtggcccgctggtgggctgagccacaaggcccccgatggcccaggagcagatgggaggaccccgaggccagacgcacactgtccgagccctctgctcagccgcctgggacccaccagggtgcagctgggctccagggtccagcccacaagctgcatcagggtctctgggagaggaggggcctccagggccaggagtcccagactcacgcaccctgggccacagggagccgggaatcggggcctgctgctcctgctggcctggaagactctgtggggtcagcactgtactccgttgctgtttttttataaacacactcttggaagtggaaaaaaaaaaa

SEQ ID NO: 21 - DNA, 276 bp, Homo sapiens
  misc_feature: n=a,t,g or c
gatctggagaagtaagatggccaaataaaagcctctaccaatcatcctccccacaggaacaccaaatttaagaactatctacacaaaaaagcaccttcataagaaccaaaaatcagagagaacaaggataaagaagtatccaaatacaaagaaaatgttatgcaagtgacctttagagatgttttaaagatgacaaaatattgatgangatgggccaacaagtgttactgttacctctaataaagtttcatcactagtttcaccatggttaattgg

SEQ ID NO: 22 - DNA, 351 bp, Homo sapiens
  misc_feature: n=a,t,g or c
gatctgaagaagctgaagaaanacaggacagtgagaaaccacttttagaactatgagtactacttttgttaaatgtgaaaaaccctcacagaaagtcatcgaggcaaaaagaggcaggcagtggagtctncntgtcgacagtaaagttgaaatggtgaccgtcnactgctggctttattgaaccanntaataaagatttattnattgtaatacctnacagccgttgcaccatatccatgcacatttagttgcctgcctgtggctggtaaggtaatgtcatgattcatcctctnttcagtgagactgagcctngatgtgttaacaaaataggtgaaggaaagtctttgtgct

SEQ ID NO: 23 - DNA, 339 bp, Homo sapiens
ccagggcccaaggaggagaatgctgcctccttcagtctggtctacacccactttctggtagcctctctgcttcctgtaattctggctgtttttccagactcagctcaaatagtgcccctccttaagcccaccctcgcccccagcctgaggtgatctttccctcctctgaactattagagcagttactgtctgttcagttcgtttggcaggcacacacagtggcataaattctattgttttgaactctgatttaaaattaaattgcagctgggcgtggtggctcatgcttgtaatcccaacacttagggagtcaggagaatcacttgagctcagggagtt

SEQ ID NO: 24 - DNA, 287 bp, Homo sapiens
  misc_feature: n=a,t,g or c
gagtctgcccgtgtctcaatggttggccaagtcaaacagtgtgaaggaattacaagtccagaaggctcaaaatctatagtggaaggaatcatagaggaagaagaagaagatgaggaaggaagtgagtctataagcaagaggaaaaaggaagatgacatggagaccaagaaagaccatccatacacctggngaattnaactggcaaaaacagaaaaatactgggacggctngttccgaggcttatccaatctctttcttagttgtcccattcctaaattgctgctctt

SEQ ID NO: 25 - DNA, 450 bp, Homo sapiens
  misc_feature: n=a,t,g or c
agaatttacacaccaaattccctgaaagctaaagtattgttccataacttacacttgaggcaatctgctcagtgtgtaaccactttataaaaaataacttaccattgataacctggaaggtggactacttgtaagtagctggtgtttattgattaaaccatggaagttttcatgatacccaagcatgttgctgaaactgatgcatttgaaagagctgttgaaataatgcaaaactttggttttataagaatctactcatgttttaaaagtatttaactctgtagaccacaattatagaaagctcagtaatgctgctaatgacatttgtaaactatatctgtaatgtaggtgcaatatttttatatttccactggggagaggccagtaggagacctcatagttgtactttagtgccagtgggggggaacnctcccaataggccnagggttt

SEQ ID NO: 26 - DNA, 476 bp, Homo sapiens
  misc_feature: n=a,t,g or c
caagggcaggtcttcatatttttgatcatccctttctcccagtgaaatcccatagcccttacctagagtctagggcacaaagacttcggggaagatacactgagattgacctgaggagacatctacacacaccagtggcagctgccccagggcctgcttccccttcctaagtctgtcatcctctggaagggatgggtggtgctccaatctctggtgcctaaaaacccaagtttatttctctcttaacactggcaataaccagtccacaccactgttgccttttaaaacctcttaataatctcatgctgtgtttgttttgattccaatccaattatcaccaggggctgtgtggggtaaatgcttttaaatgctctcttcatcttgttcttccccctncaccccctacttttagggtatgtatgatgctaatcttgtncctaagtaaggtttctttcctggtnccttttgtntttttg

SEQ ID NO: 27 - DNA, 393 bp, Homo sapiens
  misc_feature: n=a,t,g or c
cttatagaaaggaaatattttgtcaagagctttcatttaaaagctactacctccacaatcacccccaaacccagaaaatccccactggctcttgccagttctggttttcgtattgcagttattccaattgtatttgatctccctgataacgtattttcatgggtttgggtagaagatgctaatcagattagaagcaggaatagttatttgctgtctgtgaaattgagccttttggtgcgccacgttgtgccagatcaacacttctatccctctgcactgaccacgttgtgaactggggagaccaaatgcaagccatttcatgggacataggcaatatnacaacccaaactnctgttccntgggggtttatatttgtnaactctttgcaggttg

SEQ ID NO: 28 - DNA, 468 bp, Homo sapiens
  misc_feature: n=a,t,g or c
attcggcacaggaaggctttaaattactgattcacctttaaaggaatgttgtgagaattgatgtaatttctgtttctgtttccatctaaacttctttataaaaagagggattagtttttttgttttggggtaagcacctaatttatccagtaaccaacaaccctaaccattggcatatatagtctttcactcagaaataaacaaaaactgtttggtatatctgtatcattgctaatcttgtgcactttactttttgggcagtaccatacatagtctgaggctattgacttaaaccaataactgtactttatgtaatgactcttaaatttggttacctggggttcacagcttgcttggaagagaaaggatggctagaattaaagtaaggcagctggaagagcgagccaaatncaaggacaaaacacagtggttctcaggttttttcgtagtgtggggacngtgggtttg

SEQ ID NO: 29 - DNA, 2754 bp, Homo sapiens
tgccaggttcttggagctgtgaggaggaacaaccatgtcatcagaatcgagcaaaaaacggaagcccaaagtgatccgaagcgatggagccccagctgaaggaaagcggaatcgatctgacaccgagcaggaaggtaaatactacagtgaggaggccgaggtggatctgcgggaccctggcagagactatgagttatacaagtacacctgccaggagctacagaggctgatggctgagatccaagacctgaagagcaggggtggcaaggatgtggcaatagaaatagaagaacggaggatccagagctgtgtgcatttcatgactctaaagaagcttaaccgattagcccacatcaggttgaagaaaggaagagatcagacccacgaggctaagcagaaagtagatgcctatcatctgcagctccagaacctgttgtatgaggtgatgcacctacagaaggagatcaccaaatgtttggagtttaagtcaaagcatgaagaaattgatctggtcagtttagaggagttttataaggaggctccaccagatatcagcaaggccgaagtcaccatgggagaccctcaccagcaaacactggcacgtctggactgggagctggagcagcggaaaaggctggcagagaagtaccgagagtgcctatctaacaaggagaagattctcaaggagattgaggtgaagaaggagtacctgagcagcctccagccccgcctcaacagcatcatgcaggcttcccttccggtgcaggagtacctgtttatgccattcgaccaggctcacaagcagtatgagacagccagacacctgccgcctcccctctatgtcctctttgttcaggccactgcgtatgggcaggcctgtgataagacgttatctgtggcaatcgaaggcagtgtggatgaagccaaggctctgttcaaacctccagaggactcccaagatgacgaaagtgactcagatgccgaggaggagcagactacgaagcgccggagacccacactgggggttcagttggacgacaaacgcaaggagatgctgaagaggcacccactgtctgtcatgctcgacctgaagtgcaaagatgacagtgtgcttcacctgactttctactacctcatgaacctcaacatcatgacagtaaaagccaaagtgacaactgccatggagctgatcacccccatcagtgcaggtgacttgctgtctcctgactcagtcctgagttgcttgtatcctggggatcatggaaagaaaactccgaatccagccaatcagtatcagtttgataaagttggcatcctgactttgagcgactatgtacttgagctaggtcacccctatttgtgggtgcagaagctgggtggcctccacttccccaaagagcagccccagcaaacagtgattgctgaccactcgctgagcgccagccacatggagaccaccatgaaacttctgaagaccagggtgcagtcccgcctggccctccacaaacagtttgcatccctagaacatggcattgtgccagttaccagtgattgccagtacctcttccctgccaaggttgtctctcgcctggtgaaatgggtgacaattgcccatgaggattacatggagctgcacttcaccaaagacattgtggatgcgggactggctggggacaccaatctctactacatggcgctcatcgaaaggggcacagccaaactgcaggccgctgtggtgttgaaccctggctactcctccatcccacctattttccagctctgtttgaactggaaaggggagaaaaccaacagcaacgatgacaacattcgggccatggagggcgaagtcaatgtgtgctacaaggagctgtgtggcccttggcccagccaccagctgttgaccaaccagctgcagcggctgtgtgtgctgctggatgtttacctggagaccgagagccatgacgacagtgtggaggggcccaaggaatttccccaggagaagatgtgtctgcggctcttcaggggtcctagcaggatgaagccatttaaatacaaccatcctcagggattcttcagccatcgctgatctcccgcgcagaccgttgtttcccccaaggcctcaccctgagcactgggcttctgctttctgctctggcccacatgtgactcttgatattctccaaagacaccagccaattaaaaagcgtcacctgaccagtagcctttgtctgtggttcctggcaaggtggctttgcagtctggaagggcaggtgggagctgtgacacagtgtgaaaaagcatttgtagagagactttttctcagcagccaataaaagcagagtggaaaaagattccaattctgcagagagatgctcacctcttgtctacgcacaccctatttgtgctttgcggggtgaggtcctcatgatcttgtatttattatcccaagttcctgctgttaagaggtggtaggagaagccaaaggcagcagagcacaaaaagcaaaactcttccctccccacccgctcttcccattagtcctgtcagggttgccgatggacaaattgtctctgatcgttggatgttataaatgtctgacagtgcagtgcaaacagaagacaaactcagttgatccttgaacaactcaggggttaggggcaccaacaccccctgccctgcacagttgaaaaatccgtgtataacttttgactccctaaaaacttaactaatagcctgctgttgaccagtagtatg

SEQ ID NO: 30 - DNA, 537 bp, Homo sapiens
cagtggccgctccctgggccgtaggaaatgagcgataacgatgacatcgaggtggagagcgacgaagagcaaccgaggtttcaatctgcggctgacaaacgggctcatcataatgcactggaacgaaaacgtagggaccacatcaaagacagctttcacagtttgcgggactcagtcccatcactccaaggagagaaggcatcccgggcccaaatcctagacaaagccacagagtatatccagtatatgcgaaggaaaaaccacacacaccagcaagatattgacgacctcaagcggcagaatgctcttctggagcagcaagtccgtgcactggagaaggcgaggtcaagtgcccaactgcagaccaactacccctcctcagacaacagcctctacaccaacgccaagggcagcaccatctctgccttcgatgggggctcagactccagctcagagtctgagcctgaagagccccaaagcaggaagaagctccggatggaggccagctaagccactcggggcaggccagcaataaaa

SEQ ID NO: 31 - DNA, 493 bp, Homo sapiens
  misc_feature: n=a,t,g or c
cctggattaaaaggatgatttttaagctctttagtcaagagacggtgatgaagtttgtgccgcggtacagcctcgtcctagaactcagcgacagantagccttccggagaagcctgcatgatcccgatgggctggtggccacctacatcagcgaggtgcacgaacacgatgggcacctgtacctgggctctttcaggtcccccttcctctgcngactcagcctccagntgtnttagccctcccagatagctgcccctgccacgcagcacaggagtcttcacactcaggcaccaggcctggtccaggaggagctgtggacacagtcgtggttcaagtgtccacatgcacctgttagtccctggagaggtggtnggaatggctgcttcattcctcgaggatgcccgggccccaactgggcttggtctttcctggttagagggaaagtgtaacatatctgccatgangaacataaattcatgtaaagccattttca

SEQ ID NO: 32 - DNA, 396 bp, Homo sapiens
  misc_feature: n=a,t,g or c
ctgaaactgtcggaatatatgggtcttgaaattcagaagatgatagtcactcttcccatatttataggctattaaggcaagggatatcttaaacatcatattactttatttagatttctactactccaattattaatgttatgtatttctcattgttttacttcttcatggtattatgaagactatatagatgattcaaccaagcctgcaaatctccctcttgtgggaattccactgggacccaatctgttttccatttccattgcaatactactaaagccatacaatatcaaggcaccctccctctagggtccgggggacttatcacaggaggaggcagggcatgttagggttttagggactgggtttcgggggggtcgagtgtagggggnaaac

SEQ ID NO: 33 - DNA, 441 bp, Homo sapiens
  misc_feature: n=a,t,g or c
atgaatggcacaccatttctccttctcctgccccagggatnaaccactgatctgcatcagagttgcctgctattctctggtgtatccttcacatctaggtgccctcaagcagctgtgtgagtgttgagatctctgccatctctggctgagatactgctgtcctgtgaagtgtttcccatgacctttttcttcccctttgaatccctctgtctggagtagtccttgcctcttcctgctccagtagggccttttccctaccccagcccctgtgccagggtaagctggtacaagagctgccaacctcacagagtgtttgctagggcgagagaggtgcaggggaagagggcagaggtattgcaccttcccccttgaagagagggggaaagggcttacagtgggcccacataanttggcctgattcacaatttcaggttacctttt

SEQ ID NO: 34 - DNA, 374 bp, Homo sapiens
  misc_feature: n=a,t,g or c
gtatggtgctttaaatactaattttatatttcaagctttttgcagggtagaaataagtggctgttaaagaaaatatcttcaagaaggattatttcagtgtccctttttaaaactcgatgatggctttcagtttatttaagtcttctgtttttcagctccagttaaaactgacaataggcagctatcaaaaatggaaaaaatcttgtgctctttctggaatattagaggantcagttaataatagtaaagtggtattaacccaatacttgatttgcagtttttaaagcagtttttaaattgagagaaaaggggctgggncaggctggaggcgggtggatcgcctggaggtgcaggagttttgagaccagccgggc

SEQ ID NO: 35 - DNA, 358 bp, Homo sapiens
  misc_feature: n=a,t,g or c
gctattgaagacaagctacaggatggagttcagaaaccatttcaaaacttgcaaaagctgacattaagatctgggtgcttactggagacaaaaagggtaattcattgtgcagggaagcatatctgttaattcacaaatatttatagctgccgtttcctttgcccaagatgacctcctcagacttttcatcctgtacaaacactgtttctttggacggaagatgctttttctgagaaaccctcctctgtttttccagcacatccttctgcatcctttcctgatccccctcagtagcagtttcttccttattaatttagctcctgggccatgtctttgctggatnataatcggtcttatc

SEQ ID NO: 36 - DNA, 84539 bp, Homo sapiens
gatccgccctcctcagcctcccaaagtgctgagattacaagtcaccacgcctggcttccgtatttaagtattaggtggtgactccatacaaaatatttaacagcttgctggttaacatttaaatctttgttgctaagaccttttctatgtttgacagttattccaaacacgttccatataggaatagtttgccaaatagaagaacacgggatattcttctcccatggctgatgtgttgtgattctaggtgcatatttctgtttccaagaacacggacctgttctcaagttcaaacactgcatcaagagactgtgccccatgtcttttcacttttttccctctctctttctctccccttcccctccttgatttaatttcttcagcaggtcagaattgatacagcttccagaagaaatagtagaagtaggcaaaagattagtttttaattcttgttctgtcaaatactttttgattgaaattgtttttattacaaaggtagcatttgctttttgaaaaacaaaataagaaaaatctttttaatcacttcactattaagtttgttgaatattccctcataactttttctcctggctttttgagtatttgagacatttctttccacattgcagttttgaaacattctaccccacactcatacatgaaagtgaaggctctgcttctcagagtacagtttaatttactttgtggacatcattaacaaaaggcagagaaagacattggaccatactaattgtgggacttagaaaagctatattagtgatggttattaagtatcgcttgcagtggagtctgtaacatattcctatgaagttaatctaactactgagatagtgggagtgcagaggaggcatgctgtgagatggagtggtattttccagcatggcttttctgtttcttgaaaaccctacagcactttgccatggtttctcatctggatgaaataaagcacctgtaccttagtatgtcctgccatgcctttgtatggcatacttggctttgttctccaggcctcttcccacagtaacaacggattctttaggaattggaagggggggccgggcatggtgactcacgcctgtaatcctgggactttgggaggctgaggcgggtggatcacgaggtcaggagtttgagaccaacctggccaatatggtgaaaccctgtctctactaaaaatacaaaaaagaattagctgggtgtggtggggcatgcctgtagtcccagctactcgggaggctgaggcagaagaattgcttgaacccaggaggcggaggttgcagtgagctaagatcgtgccactgcactccagcctgggtggcagagactccgtctcaaaaaaaaaaaaaaaaaagaattggaagggaatggaggaagcaaggtggttaaacaaaaatcatctttacacacaccacccactctatgatgtatatgagttcagaagagcactttgctttatccttaatagaaatatctgtaaagccaggggagtcataaagctgtaggctaagtaaggtgccatgagaaaaggaggcttcacttacgccagtatttggagcagcgtttggcctcttggaggtgtttgcacccatcggagatgctccatagtgagatttaggataagtgcaaggtgagctttgcttttgtaaaatgcatgaagtgtgaccacgaaagggccatgggaaagaattattgatgggttacaggtgcatcgtttcaggcagattgacactaggaaagagcaaagagcaggtagaggtttgacagtttactcctttaaagtaatccatgtccaataacccatggaaagtcttcatgtacttctaaggggtagacataccctagtctaggtgctaatctaggttctatcatgtgttagctgtgaccctgggcaaataactttatcctatggcctcaatttcatcttgcaaaaaaatacggattagataatggcacttccttaaaaggtttgatgggatttcaatggaatattgcatagaaagtgcttgaggcattgtaagtacacagtaagtgaagtgttgaccattattaatatcatgatgataaagtgtgtaacttattttataagtaccatataattgaaatttgccaatagtaactcctcggagacttccagggaactctgtcaatcaaaaaaagctttgtgtaataatggacgctaccttgacagagtgtgttagtcaagagaggatacttatttataaattttgggatatttatacttttttttttttctttagagatggagtcttgctctgtcgccaaggctagagtgcagtggcgcaatctcggctcactgcaacctctgcctccccagttcaagtgattctcctgcctcagccttccaagtagctaggactacaggcacctgtcaccaggcctggctaatttttgtattttttaggagagacggggtttcaccatcttggtcaggctggtctcgaactcctgacctcgtgatccacacgcctcagccttccaaagtgctgggattacagacgtgagccaccgcacccaactataaaatgtatttttatagatacttattgaattttaggatgtgggctgggtgattattttttaaagtacttttaaaaaaattaaggtattatttacatataatatccacccatttttaagtatacattttggtgaattactgtgtgtcaatcatgtaacctcaaacacagccaagattataaaacagttctctacgctgctttggtgatggatacaccaaaatctcagaaaccaccactacagaacttattcatgtaaccaaacaccatgtgttccccaaaaacctattgaaaaaaaaaaagaacccaaaaccaaaaaacagttctctcaacattaaaagttttcctgtgcctttttccagtggattccttccctcagcctctggccccagacaaacacttatccactttctgtgtctgtagttttgtcttttcaagaaattcctatgaatggaaccatataaaagttatataaaaatcatagacttttgtatttgatttcttttactcttagcatcatttttttgagatttactcctgttgtatgtatttacatttcctctttttcttggtgagtaatattgcattatatgaatatctcacaatttatccattttactagtggataacattagattgcttccaacttgaggctattatagtacagctgctatgaacatttgtgtattcaccattgtgtgagcatatgattttccctaccttcttttctatttcactttcttttcctttttctttccttttttttttttcttttttttgagacagtctctctgtgtcgcccaggctggagtgcagaggcacgatctcggctcactgcaacctctgcctgctgggttcaagcaattctcagcgtcagcctcccaagtagctgggattacaggggcccgccaccacacccagctaatttttgtatttttagtagagacggggtttcaccctgttgaccaggctggtcttgaatgcctggcctcagtgacccacctacctcagcctcccaaagtgctgggattataggcctgagccacagtgcccggccctttttcctttctttttttgagataggatcttgctcaatcatgcaggctggagtgcagtggcacacttggctcactgcaacctccacctcctgggttcaagcgagtctcctgcctcagcctcccgagcagctgggactacaggtgcgtgccaccacgcccagttaatttctgtgtttttagtagagacggggtttcaccatgttggccaggatggtctcgatctcttgacctcgtgatctgcctgcttcagcctcccaaagtgctgggatgacaggcgtgagccaccaagcccagctgacaatggattttctttgttttctccttcatctgaagatgtcttccctttgccttcatttttaaaggatattttctctgggtatagaattataatccgagagtatagaggttgacaagttttttggtattggttttagttttgggttgtgtctttttgttgttggcttttgttttgtttttgccccttatagatgtttcactgtcttttggctcatgtgttccgatgagaagtcagcccttcattgggtccttgttctcatctgtttaatacctgttcccatacctgccctttctctctcactgcttttaagatttgctctttatctttggttttggagtatttgactatgaagtgcaagctgctttgtttcttcttggtgtacattcagcatcttgcatcttcaagtatctgcgtatcattaagtttgggcagtttttggctcttgtttcttctaaattttttctaccccattctccctgtccctctccttttggtattgtagttacccactggaacacgtgacattatgtagcaagtctctgagtctgttcatttttttccttcagtcttttttttttttttttgaaatggtctctctctgttgcccaggctggatggtacagcggtgtgatcacgactcactgcaactttggcctcctgggtttaagccatcctcctgcctcagcctctttgagtagctgggaccacaggcacgtgccaccacgcctggctaattttttgatttttactagaaacagagtcttgccatgttgcccaggctggtcttgaactcctgggctcaagcaatccacctgccctggtctcccaaaatgctaggattacaggtgtcagccactatgccagccttttcaattttttatctctcttcttcatcttggttaatttctactcatcttttttgaaatgcacatactgtccttttctttgtccattcagctgagtatatccagtgaattttttatttcaaaaagttaatttttttcagttctagaattgccatttaattattttttgttgttcctatttcccccattgagatttcctacttcttagctgagattttcattcattggaaacatgccttatactgcttcattgagatgattataatagctgcttaaaatctttgtctattccagcattttgttgatctgcaggttagactggcagttgaactaatttgtcccactgtcttgcttctttgtatggtgggtagttctggattgtttactggactgtatgaatgtcaaattctggatattctggattctgttacttttctctaatacttgtttggttttatcaggtggttttcttggctgggtttgaacacaaatgtgtttctctctgagatctttagtctgtagctgagctgctttgtgtctgtcccatgcatgagtggctcaagggtcagtcagggatgtgattgtacggggattggagatcttcccctgcctttttcccttctaggattacttcagtctatttatttatttgtttatttatttagagacagaagtcttcctctgtcacccaggctggagtgcaatggcgcgatctcagctcactgcaacccctacctcccgggttcaagcgattctcctgcctcagcctcctgagtagctgggattacaggcccgcaccaccacgcccggctaatttttgtattcttagtagagaaggggttttgccatgttggccaggctggtcacgaactcgtgaactcatgctctacccgcctcagcctccccaagtgctgggattacaagcgagagccactgcgcccagccggctctctttgttattcatagtttcctggcttctcttttctgagccacccagccaaaaatgctttgactttttctatgcatgtttctgtcatgtctgtgcatgacataaatcataatatcctaagacacaaaattgttaaaggcaataatttggaaacatacaacaataaataaaatggttatagagatgtaactttaaaaagttgaacattttgttaaaacgattcctgaatatgctggaaaattcagatagttaacaaaatattttgaggataaaaaggaaaggaatctgttatctggaggtagaataacttggccattttacagaaaggaaacaaattctgatttcactttttgtatatcatccatttgacaattttcaataaaaggtttattgaaaacggaatacataaggctggtgtttggacctttttcctaattagaaattgtccatgtctccaaagattattaactcagtttattatcagctaaagagatcttaaagttgactaaacacctggaaattaaaacttaggccaacacatcaaagtctttatgacttgaagtgttttaagaattaatgaggcaaagcacacacctgtggtcccagctacccaggagactgaggcaggagaactgtttgagcccaggagtttgaagctgcagtgagctatgatcatgccactgttcttcagcccaagagactgagtgagacctcttaagaaaaaaaaaaaaatgaccggacacagttgctcacgcctgtaatctcagcactttgggaggctgaggcgggtggatcacgagatcaggagatcgagacaatcctggctaacacggtgaaaccctgtctctactaaaaaaatacaaaaaaattagcagggcgtggtggtgggcgcctgtagtaccagctacctgggagcctgaggcagaaaaacggcgtgaacccaggaggcggatctcggcagtgagctcacaccagtggctcacacttgtaatcccagcactttgggaggccgaggtgggcagatcacctgaggtcaggagttcgagacaagcctgaccaacatggagaaaccccgtctctactaaaaatacaaaattagtgggcgtgtggcgcatgcctgtaatcccagctacttaggaggctgaggcaggagaatcgcttgaacccgggaggtggaggttgcagtgagccaggatcgcgccattgcactccagcctgggcaacaagagccaaactccgtctcgaaaagaaaaaattcatgagactaaatcattttaaaaagatgtcttttattacaatttctttcaattaaacagttttatatttttgaaattttaaacaatttgtgcaaacgagatcctactggacctataaaactaatgtagttaatttagaaggtttaaatcacgagaagttaagcccaaatcttgggttgatttaattgttgtgttaacattgtttttatatcataataaaatcagaaggatgcatagacttgtttttaagctaatattaacttctatttctagcccaaagagtcatctatcaaaagccagctcatattaagtagggggaccaagagggaggtctctcagttaaacaaagttattgacttgtctttagacaggcaagacagagtatctcctcataaggttttcttttaacctttttgttctgaagttaatatgtcttttaagtgaataatcttgtttataacaacattttcttttctgttttgtttgtttgtttgtttgagacagagtctcgcactgtcacccaggctggagtgcagtggcacagtcttggctcactgcaacctctgcctcctgggttcaagtgattctcctgcctcagcctcccgagtagctgggactacaggcacatgccaccactcccatctaatttgttttgtgtttttagtagagacggggtttcacaatattggtcaggctggtctcgaactcctgacctcgtgattcacccacctcggcctcccaaagtgctgggataacaggcatgagccactgcacccagctataacaacattttcaaagtggcacattttaatatgaataaaccttctacaatcacaggcctagaaagtttttctttttcttacggaatttcttgactgtttacttgtactagatatttcttcggtatattcataatgacagaacaattgtttatgattgattgatctccaaagtttcccaagaaaagagaaaaagtaggaggggaaggaagaaagaagtgagcagaagttggcttcagagagataggaagggccagttcccttctctgtttaaggaggggagaagacttagatgcagggaaactcattttgacatgccaactcaaaccacagaagccagagtcagttcagctggtttcagtagtaactcaggaccttgacaattctgttaagccatgtcctttaaaagccagctcttattaagtagggggatgaagggggaagcccttcagttaaacaaagttactgacctgtcttttagacaggcaggacagaggatctcctcatgaggtttttttaacctttttgttctgaagttaatgtgtgttttaaatgaataatcttatttataacaacattttcagcgtggcaactgcagtttcagaatggtggaattataccagtcagagagagatgcaaatgatttaaaataggaagaaagcaggtgtctggcccagaggaccagattaagaagaccccatgagagttacaatagttagtgaaaatggtgcttctgcaaacctcatgtctacagaagctggtcaaagaccagatgccaccaggtagaatcccagcaaactcttcaatggtagatatctgtcaccatccttaggaggtaggtctgtggaagctcactataataccatttgcttaacagatatacaaacatggatcagatataatttcaacccacaaggagctcacagtctggctcttcttttgaggcaaaaagactaaagctgttgcctttatggtaagataaatctgccttggagtcaatccaaggtgatttaattactgtaggtagttgtaccaataaggcttgtatcccagagaactccatattgcatttaagcttgttagtaagccaggccagctctatttcctgtgaggactttaaaaaaaattgcattcacacatttaaaaattagcataagcagggtgcagtgatgcacgcctgtagtcccagctacttggtaggcagaggtgggaggatcacttgagccccagaagttcaagaccagcctggacaacaaagtgaagtgaagactgtctcaaaaaaattaattatgacataaaatgttatatgtcttaatttacacaaatataagtatatacttttaaatcccattcttacacacaaaagctagcatactgtgtaaagtattctggacctacacacctttatttttttaacataacaatatgtcttggatacattttcctatttgtctatagaaagtttcatcattattttaaaaaatttgtttttggctgggcacagtggctcatgcctgtaattccagcactttgggaggccgcggcaggcgaatcaggaggtcaggagtccgagactagcctggccaacatggtgaaaccccatctctactaaaaatacaaaaacttagctgggcgtagtggcgggcgcctgtaatcccagctacccgagaggctgaggcaggagaatcgcttgaacccgggaggcagaggttgcagtgagccgagatcctgccacagcactccagctggggcgacagagtgagactccatcttaaaaaaaaaagtttgcttttatatttcatacctgcatggtattctattgtgtgagtaggccatcatccagtggtcttcaaactttcctgtgtactccgtaacagaatttgttgttttgacatgcagtctcactctgttgaccaggctagagtgcagtgccacaatctcagctcactgcagcctccacctcctgggttcaagagattctcatgcctcagcctcttgagtagctggcgcatgccaccatgcttgactaatttttgtatttttagtagagacgggatttcaccgtgttggccaggctggtcttgaactcctgacttcaagtgatctgcccgccgtggcctcccaaagtgctgggattacaggcttaagctaccacgcctggtcttctaatagaatttttaaaaactgtatttacccccttgcacatttaaattgacatctaagatttttattataagtttaaatagttgtaaaggatgtattttccattatattttatacattccttaattttatatatatatatatatatatatagttttttttttttttttttttgagatggagtctcactctgtcacccaggctggagtgcaatggtgcgatctcggctcaccgcagtcactgcctctagggttcaagagattctcctgcctcagcctcccgagtagctgggatcacaggcacccgccaccatgcccggctaatttttgtatttttagttgagatggggtttcaccatgttggtcaggctggtctcgaactcctgacctcaggtgatcccccccacctcagcttttcaaagtgttgggattacaggcgtgagccactgtgcctgccctcccttaattataatttaaaaaatttttgcagatgtagatttatataaattggcaagccagttctctttatcaaattaactgatcaaaaaaaaaaaaacagattaactggtcaaacatagatttactttctgtcagtaaaattttgacttcatttttttaaatcaaataagcatgttaacccggtattgctgtgacaacctttatcctaatttcttttcttcttcttcttcttcttcttcttcttcttcttcttttttttttttgaaatggagtcgtgctctgtcacccaggctggagtgcagtggcacaatctcggctcactgcaacctccacctcccaggttcaagcaattcttctgcctcagcctcccgagtaactgggactacaggcatgcaccaccacgcctggctaatttttgtatttttagtagagatggggtttcaccgtgttggccaggctggtctcgaactcctgacctcaggtgattcgcccaccttggcctcccaaagtgctgggattacaggcatgagccatcgcacccagcttttttatcccaatttcaagatgggtgggcaggtaggtaggtaggcaggtgggtagatagatagggccttcagacttgcctcgcattcatcttttacataaaataagacagtttcaccttgaacacttctgtggtgagactgtttagtcttgtagctctaaactccagccatactctgatgactcccacatttataaatcccagatttgtatactcaactacttatctaacaggtcaaaactgaactcttaaaattcttacatttgtgtccacacatgattggctaagctaatggggctcagatttaccctgtcacctgaaacaactgtaaaactggagaaaatatgtcaaactctgaagttattaggtctaaggtgattaagaacagcgaatcctgagacctgagaaatagagccctatgattgctctgatttaatgctcggagaaagtttccagaccgcggtgcggggagaaggaacatcagcaggccccagcagtctctcctcattgaagaggtaaaatgaaaatccagggcagctggggcagctagagttcacaggcagagaaacaaagaggcaagagatgcacagagaagagaacactggcctgcagatgcccagggagcccactcgagtattcggttgagtactgatcagtgcacccatgtgaggaaaccccttagttcagggaaggagccactcaaaaggattagagagaaccatttacggagttcacacagggccagaaatagttcctgttcccagtagcagagtagaacatttcatgattcaggggtattgattggagtactaagaagagttgtattagtgaaggttcttgagagagagagagagagagagagagagagagagagtgtgtgtgtgtgtgtgtgtgtgtgcacgtgtgaagaaatttattgtaaggaattgccacgtgattatggaggctgataagtcccaaaaatctgcagggcgagtcagcaagatggagacttaggagagccaatgatgtggctatagtccaaaggctgacaggctcaagacccaggcagagccaatgtttcagttcaagtccaaaggcaggaaaaaagttgatgtcccagttcgaaggcagttaggctggaagaattctcttttactcaggaaagggtcagattttttgttcaattcaggcctttaacagattgaatggggctcacccacattagggaggccaagctgctttacgcattttgccagactaacgtttgaccaaagatctgagcacgtatggcccagtcaagttgacacataatgttaatcatcacaaaagtcttgcctcaatagttgggaaaaattaatcctagaataaatgctattctggtcttgcttagcaaaggttaagagcaagaccaaaaagatcaaaccttttccaaacaaaagctgaagaatatttttagggatacaaaaccatctaggaccgagtgtggtaaaatgcacaatgtttaccagccattccagaattactaggtatgagcagaagtagtaacatacaaccaataactgaccagaaatgagacagattatataagtagtacattacagacattagtcattataattgtattccatgtgttcagtaagctaaagaaaagatttaatatgttaagtaaagacatgaaagatgatggctgggcatggtgcctcacgcctgtaatgccagcactttgggaggccaaggtaggtggatcacctgaggtcaggagttcaagaccagcctagccaacatggtgaaaccccacctctactaaaaatacaaaaattagctgggtgtggtagcgtgcacctataatcccaactatacgggaggctgaggcaggagaatcacttgaacctgggaggcagaggttgcagtaagccaagatcgtaccactgcactccaacctgggcgagagagcaagattccgtctccacaaaaaagaaagatacagagatgaaaaatacactgaagactgtcagaataaacattgcacaagtaaagatttgtgattttgaagacttaaccatagaaactatccaaaatgaagcagaaaaaaaaaagaaaccctgaaaaaaatacatgaacacaacatcagtaaagtgagggacaacatcaggtagccaaatgtgtgtggaattggagtccctgaaggaagggagggtatgagggaccaaaaaatatatatagagagagaaaaaaaaatggctgaaaaatttccaagtgtaatgaaagcagtaaacacacagatccaagaatttcaaggaactccaagcacaggaaacatgaagaaaaactatatactaaggcacatcttaagcaaattgcttaaaaccatggtttaaaatggccaaagaaaaagatacattatatacttaagatcagggtgacaccagatttctcattggaaacaatgtaagccaggttaacagtggaacaatacatttaaagcaaagaaagaaaacagttgtctacctagaattcttttctcagtgaaaatacctttcaaaaatgaaggcaaaataaggtctctttcagactttaaaaaaaaaaaggaagaatttattaccagtagatatgcagtacaagaaatatcaaaggatgtaattaaagcagaaagagaatgataactggtagaaaactggagccaccaggagtcccaggctgcagtgagctatgatcgcaccactgcattccagcctgggtgacagagtgagaccctctgtctaaataaacaaacaaataaaagaaaactggagctataaaaataaatgaagacaatgcaaagggtaactaagtggataaatacataagatattttttctttttgtttcagtctcattaaaagatatgtcttagaggtaattacacattgtagcatttgtaacttacatagaagtaaagtttatgacaatagcagcacaaagactgggagtgggagaacaaatatactcttgtaagctttttacactacatgtgaagttgtataatgtcaattgaaggtagactgtgataagttaaagatgcatatgataaaatctatagtagcagagttatagctaatgagccaacaacaataaaaagttgggatataatcccaacactttgggaggccgaggtgggtggatcatgaggtcaggagttcgagaccagcctgaccaacagggtgaaactttgtctctactaaaaatacaaaaattagccgggcatggtggtggcacctgcccgtaatctcagctactcgggaggctgaggcaggagaatcacttgaacccaggaggcagaggttgcagtgagcggagatagtgctactgcactgtagtctgagcgacagagtgagactccgtctcaaaaaaaaaaaaaaaaaaaaaaaaaagttgggataaatatctttaaataatccaaaagatggcagaaaaaaaaactaaacaggaaaagcaaacagagcagatgggacaaatatgaaacaaagagcaagatggtaggttaaaattcatatcaataattaattcaccattaagggccaggcagagtggctcatgcctgtaatcccagcattttgggaggtggattaggaggatcacttgaagccaggagtttgagaccagctttggaagccaagtgagactccatctctacaaaaaaaaaaaaaaaaaaaaaaattagccaggtgtggtggtgtagttccactcaggaggctacggtgggaggatcacttgagcccaggagtttgaggctacagtgagctctgatcacaccactgcactcctccagcctgggtgacagcgagattccatcttaaaaaaaaaaaatcctcattaaaagcagacattgtgagattggataaaaaagcaagacctatttatatttatatgctgtctacagttatcccactttgaatataaaaatacaaatacgttaaaagcaaaagagtggaaaaagatgttaatatgttaacattaatgaaaagaaaaccttagtggcatattaaacaaactatattttaaaatgaatgtcaccaaggataaaggagaattatttcataataataaagagatacattcatcaagacataattctaaatgtttatgcatgtattaacagagattcaaaatacaaacttttcaaggagaaataaatctgtaattatagttgaaggtttaacaactctctcacaaaaactgatagaacaagtagacaaaaatcagtgaggatatagaagatttggacaatataatcaactgacttgacttaattgatgttcagtagaacattcgacccctaaacagcagaatacacgttcttttcaagtgcatatggaactgtttccaagacaaatcattttctgggccattttaaaagcctcagtagacccggcggggtggctcacgcctgtaatcccagcactttgggaggccaaggcgggcggatcacctgaggtcaggagttcgagacaagcctggccaacgtggtgaaaccccgtctctacgaaaaataccaaaaattagctgtgtgtagtggtggatacctgtaatcccagctactcaggaggctgaggcaggagaatcacttgaacccgggaggcagaggttgcagtgagccgagattgcactactgcactccagctgggcaacagtgagactccgtctcgaaaaaaacaaacaaacaaaagcctcagtgaatgtaagctgattcaatttgtagaaagtatgatctctggccaggtgcggtggctcacgcctgtaatcccagcactttgggaggctgaggcgggcggatcacgaggtcaggagatcaagaccatcctggctaacatggtgaaaccccttctctactaaaaatacaaaaaatcagctgggcatggtggcgctcacctgtagtctcagctactcaggaggctgaggcaggagaatcacttgaacccgggaggatgaggttgcagtgagccgagatggtgtcactgcactccagcctggctgagagagcgagactccatctccaaaaaaaaaaaaaaaaaaaaaaaagaaagtatgatctctggccacaaggaattaaatgaggaattaataacagaaaggtatctggaagatctttcaaatatttggaaaataacataattttaagtaaatcatgggtcaaagaaaatcaacagcgaagtaagtaagtatctggaactgaatgaaggtgaaagtgccacataaaatttgtgtgatggagctaaagggaaatttatatagtgcagatggtccctgacttatgacgtctcaacttacatttttcaattttatgatgggtttttcaggatgtaacccaattttaagttgagcatctgtatcagaaaagaacaaaggtcccaaatcaatgaccttggggtcccacttttagaaattagaaaaaatgaagactagtgaaaccccaattaagcagaagaaaaagccagtgtggccaggcagggaggcccatgcctgtaatcccagcactttgggaggctgaggcgggcagatcacaaggtcaggagattgagatcatcccggccaacatggtgaaaccccgtctctactaaccatacaaaaattagctgggcgtggtggcgcttgcctgtgtaatcccagctactcaggaggctgaggcaggagaatcgctttaaccagggagtcggaggttgcagtgaaccgagatcgcgccattgcactccaccctagcgacagaacgagactccgtctcaaaaaaaaaagaaagaaagaaagaaaaagaaaaggccagtctggaaatcaatgaaacagaaaaccagtacagaaatcatgaaaccaaaagctagttatttgagagagcaatgaaactcataaacctctacccagactgatcaggggaaaaaagggaagacaataactgtaatatcagcagtgaaagagatgacatcacacagattctaaagatattgaaagtgtaataactgaatattgatcagcaatctagaagaaacagattccttgaatgacacaaactaccaaagttcactcaagaagtaaccatctgccgggcgcagtggcttacgcctgtaatcccagcactttggtaggccgaggtgggcggatcacgaggtcaggagaccgagaccatccttgctaacacggtgaaaccccgtctccactaaaaatacaaaaaattctccgggcgtggtggcgggcgcctgtagtcccagctactcaggaggctgaggcaggagaatggcttgaacctgggaggcggagcttgcagtgagccgagattgcaccactgcactccagcctgggtgacagagccagactctgtctcaaaaaaataaaataaaataaaaataaagtttagtaaaataaaaaaaatcagtaaaatacaaataaaatttagtaaaaataaagctgattctaaaatgcatgtgcaacagaggatctagagtagccaaaataagctcctctgtctgacttaaagtcttaattaaaataatcagacaggccgggcatggtggctcacgcctgtaatcccagcactttgggaggctgaggcaggtggatcacctgaggtcaggagttacaaaccagcctggccaacatggtgaaaccccatctctactaaaagtacaaaaattagtcaggcgtgatagcacacgcctgtaatcccagctactcaggaggctgaggcaggagaatcgcttgaacccgggaggcggaggttgcagtgagctgagatcatgccaccgcactccagcctgggcgacagagtgagactctcaaaataatgaaataaaaataaaaaactgaacttcatatcttgtccccagatctgatatagtcacttcttcctttgttcagttaaacccagcttcatgtttctgcttgcccagggccaataactttgggatcttccttgactcttctttttctgtcaaaccccgtaccagtctttcaggtaaccgtaacttcagagtctatccaggtcacctctgcttgtccaagcccctgtcatctctcacttggatgatttcattagcctcttggccaggatccctgcttctgctggtatttccttagtttcttctccctacagcagccagagctaatcattttaaatgtcatatttctgtctcgcctcagctgcaaaccttccagtaccttcccagctccttctaaataaacaccagaggccgggtgcagtggcttatgcctgtaatcccagcactttgggaggccaaggtgggcagatcacctgaggtcaggagttcgagaccagcctggccaacatggtgaaaccccctccctactaaaaatacaaaaattagctgggcgtgatggcgcctgtaatcccagctacttgggaggctgaggcaagagaatcgcctgaacccaggaggtggaggttgcagtgagccaagactgcgccactgcactccagcctgggcaacaagagtgagactctgtctcaaaaaatataaataaataaacaaacaagcaccagagccctggcagtcacctgtgaggcttcaccccgtctccccacccactataacctctgacttacctccttttacactccttcttgctgactctgttccttccacattggcctctttgctcttgcttgaatgatccccagtcatcctccctgcccagggcctttgcacttgctgttctctgccaggaaggtgcttcctccgtagttcactcttcacctcctttgggtctttgctcagttgtcatcttcagtgatggctcttctgatcaccttatttaatttttattttttaattaaaaattttttttgtggagatgtcttgctatgttgcccaggcttatctcaaactcctggactcaaacgatcctcctgcctcagcttcccaaagtgctgggattacaggtgtgagctaccacacccggccccgatcaccttatttaaaattgcagctcccagcccccaaccccagcatacccattcctcttttttttttttgagacagaatcttgctctgtctcaaattccctccagccatgagccctgaaatgaaacaagttatctatttccaaaacacaacagtggggcaggcataggatagacattcccattccaaaagggagcaataggcaagaagaaaggggtagctggtcccaagtaagtccaaaacctgagacagagtcttgctctatcgcccaggctggactgcagagtggtgcgatctcagctcactacaacctccgcctcccgggttcaagcgattctcctgcctcagcctcccaagtagctgggattagaggcatgcaccaccacacctggctaatttttgtagttttagtagaggcagggattcaccatcttggccaggctggtctcaaactcctgaacctcaggtgattccccccgccttggcctcccaaagtgctgggattacaggcgtgagccaccgcctggtctccctcattccttttgttatcagtcatccctcccagccctggcaactgctgctcactttcctgaccttagaattttgcttattacagaatgtcatataagtagaattataaagtatctaagcttttaagtcctaatgcatttaagatctgtaaaaagtaaagtagaggttcctcttcaaagactttcctccccatctaattaggaataaatagtaacttctcttagaagaaaaatttattcaaagacctgtgctaacattcttaaatatctgctagccataataaagaaatcaatgtactttatattcttagctctcacaatttagcctaaatatttgccctggcatgcttatactggtccaagcaagcattaggtcatggcctgttcctcttccttatttgaaggtgtttttacctttctcagcactccacaagttacttcctccttcctttgttctcctctgcctttgcctcttttaaaaagttctaagttcctagccaatcaggacaaatacagaatgtgaggtcctgttccagccaatggaaactggacacagcagtagggtggacgcgtcaggttgtaaatgaccctgtctcctttgttcagtgtactctcatggcaaaactgctggtgagtgtaccctttctgcagaaagtaaaaaatggccttgctgaggaaattaaatttatgttcaagtgctttttcttcagggcaccagggaacaagcatttctaacagatccatatgtgtcgctgcatgtaatcagtggttcattcctttctattgctgagtagtgttccattgtatggatgtacccgtgtattgatccatccatccactgaaggatatttgagttgtttccagtttttttgtgattatgaataaagccactgtaagcattcacatagaggctttggtgtggacataagttttcatttctcttcggtaaataattaggagtagaattgctaggtcgtaggataagtatatgcttaacttaggagaccctgccacagtattttacaaagtaagggtgctattttgcattactaccagcagttcacaccatatgtattcacaccagttgctccatttggtcttcgttctgtgacttgtctctattctcttaacagtatctttagaacagcagaagtttttgattttgatgaaattcagtttatcgggccaggctgggtggcttatgcctataatcccagcactttgagagaccgaggagggtggatcacttgaggccaggagattgagaccagcttggccaacatggcgaaaccctgtctctactaaaaatataaaaattagccatacatcgtggcgcatgcctgtagttccagctactcaggagtctgaggcaggagaatcacttgaaccctggaggaagaggttgcagtgagctgagatcatactgctgcactccagcctgggcaacagagcaaaactccatttcaaaaaaaaataaaataaaatttcagtttatcagtgatttctcttaagtttcatgcattgggtattgtagctaagaaatcttcacctaactcaagtttacaaagattcttctgttttttttctagaagatttataagttttaatttaacttttaggcttataattcatttcacattaaatggtgtatgtggtgccaggtattgctcgagagtcatcatcttgcataggggtttcggatgttctagcaccatttgttcaacagatagcctcttttcattaaattgccctttcacctttgtggaagatcaattcagcatgcatgtatgggtcacttgtatgtttttaattgatttctaaattctgaaaggaaaatgataaaaaggaagattctttcactatatctgcatttccaatttctcccccaagaacgctttcctaacacctgcaggcagaactaaccactctgggcccctgtagctgttgtgcgtatgtttattattgagtttttctggcctttgcagttctttcagtgtctgattctccctctctctcagcttctttctcaagactgtgcatccttggaggtcagaaattgtctcatcctgccgggcgcgatggctcatgcctctaatcccagcactttgggaggccgaggcggttagatcacaaggtcaggagttcgagaccagcctggccaacatagtgaaaccctgtctctattaaaaatacaaaaattagctgagcgtggtggcacatgcctgtagtcccagctactcgggaggctgaggcaggagaatcgcttgaacccaggaggcggggaggttgtagtgagctgagattgtgccactgcactccagcctgggcaacagagcgagactccatctcaaaaataaataaataaataaaagacaaaataaattttctcatccttttttgtcatcttcatcacagctggctctctaatgttcgttgaatgaaagggccattcccaaatctctgataagtcaagcatttttaggagagctaaaccagccaaatgagaccaggaagtgaagaaaaatacctttttttttttttttttttttttggagacggagcctcactttgtcacccaggccggagtgcagtggcacgatctgagctcactgcaacctccgcctcccaggttcaagcaattctattgcctcagcctccccagtagctgggactacgggcacacaccaccatgcccggctactttttttttgtatttttagtagagatggagtttcaccgtgctggccaggctggtgtcaaactcctgacctcgtgatccgcccgcctcagccttccaaagtgctgggattacacgcgtgagccaccgcgcccagctgaaaaatacctactttttttttttttttacagcaggaggtgtttctgcttctactttgctgtgacttctgtttctccaggcattcctggtatggacatttataccaggtgttttggtcattggtgggctctcagcttcagaggacacttggcttctctataccctatctttggtgacttctgcttgttggacttcagtcactgcagttcacaagtttcacactcatgaaatatttattgttaattaattccaatatttaattgattgcttctctttctcagcactttggaaacatgtttactacctagacattttcctacagtagatttttaattcttaacattttgatcttaagcaatttaccatgatacttggtttccatgagagatttaacagttggaactgtactgcccataagatgcaggtggggtcatggtatgtagttgggaactctacaaatggcagcccttcatgcctttgcaaaggctgcaggttggaaagctgccattacttgtgagggcgtccaaatgcttcctgtgaatggaagatgtgtttctgtgcctcactgtcttcactgtgctggattgctggctttctcagatgtctttatttgagtcaacctgtattccatctccccactcccacccagtcttgatcatctcatttgtgtgtatacaaccttcccctcacacacacctctttgcagagtttcgttgcactgggcgttgggaggagaggcgtcagagttgggtggaatcatttcaggctgactgtccagacatagctctcattagaagcatcagtaaataagctgaaaaccaacaacacgtacagcacagtctttctgtgtttgcagcttggaactgagcagccctcactgggtgcatttctaatcctttgtctcatcatttatatgacatccacttagaaaaaggtgttaaaatcatataacatattgctttttccccttttttattagcagttttactgaggtgtaatttatatgccataaaatttaccatttgaatgttcaattcaatgatttctactaaatttatagagtgtgcaccataaccacaatccagttttattttttatttttttttcgagacagagtctcactctgtcactcaagctggagtgcagtggtgcaatctcggctcactgcagcctccacctcccgggttcaagcgattctcctgcctcagcctcccgagtatctgggactacaggcacgtgccaccatgcccagctaagttttttgtattcttagtagagatagggtttcaccatgttagccaggatggtctcgatctcctgacctcatgatccgccagcctcagcctcccaaagtgctgggattacaggcgtgagccaccgcacctggccccacaatccagttttagaacatttccagcatccccaaaagatcccttttgtccctttgcagcagtcctacccccacttccagccccaggcgaccattcatttgctttttctatagatttgtcttttccgtacgtttcatgtaaatgaagttttatacaatatatgaccttttgtgactgttttttttcccagcatgtttttgaggtttatctgtattatagcacgtctcagtactttgttccctttttatcactgagtattattccattgtacggacatacatttttctctattcactagttggtgaacatttggattgtttccagttttggtcatcattaacaatgctactatatatatccatgtataagtctttgtgtggatatacattttcatttctctagggtagatttctagaagtaaaattgctgagtctttttttttttttttgagatggagttttgctcttgttgcctgggctggagtgcaatggcataatcttggctcactgcaacttccgcctccctggttcaagtgattctcctgcctcagcctcccgggtagctgggattacaggcatgtgctaccacacctggctattattattattattattttttttttttttgagacagagtctcgctctgtcacccaggctggagtgcagtgcgcgatctcagctcactgcaagctctgcctcccgggttcatgccattctcccgcctcagcctcccaagtactgggactacaggcacccgccaccacccccggctaattttttgtatttttagtagagacgaggtttcactgtgttagccgggatgctctcactctcctgacctcgtgatctgcctgcctcggcctcccaaagtgctggcattacaggcgtgagccaccatgcctggcaaattttgtatttttagtagagacgaggtttcaccatgttgatcaggctggtctcaaactcctgacctcaggtgatccacccaccttggcctcccaaagtgttgggattacaggcgtgagccaccacgaccggtcaaattgctgtcttatagtaagtttatgtttaactttttaagaaactgccaaactatttcctaaagtgactgtaccatttacattcccaccagcaatgtgtgagtgttccagtttttccatgtccttgccaatagttggttttgtctgcctacctatccccgcccctgcttttttttttttttttttttttttaagagacagggtcttgctgtgttgttcaggctggcctcaaactcctgggctcaagtgctcctccctagtagctgggactataggcacacaccagtgtaccaggggttgtctgtcttttgattatagctattggaatgggtgtgaagcagcatctcgtgattttagtttccatttcttgaatgactaatgatactgaacatctttttatgtgcttattagccatttgtatttcatctttggtgacctgtcaattcaaatcttttgcctatttttttttattaagtttgtgcactgtcttattatcgagtggtaagagttctctgtattgtgggtacaagttcttttttttttcgagatggagtctcgctctgtcacccagggtggagtacagtggcacgatctcagctcactacaacctctgcctcctgggttcaagcgattcttctgcctcagcatcccaagtagctgggactacaggcttgcaccaccacacccagctaatttttgaatttttagtagagacgggatttcaccatcttggccagacgggtctcaaactactgacctcgtgatcctcccacctcggcctcccaaagtgctgggattacaggtgtgagccaccgtgcccggccttccaagttctttatcaggtatatgatagcacatgtagctttttatcttccttacaccagtgcaagtttatagaaaggaaaagggatagttaatagtaatcataataatgtttaatatttgaatgttttttaggagctggacactgggctgcatgtttcacggggatgatttgggtcactcttcaattttctaaaggttacaggactgtttcaaacacctctccttctattaacagttttcaatggagaaagaaaacaaaagattgatttggggaattcttaggttaatgcgagttagaactgaccttttaacattattaccataaggactaaatggctgttacagacccaaaataggagcaattcaaacaagcgagatgcttctctctgtaacaggctgacagtcgcggtcctggaggggcacgatggctcctcagggtcagacacctcctgtcccttactctgtaaggcacagcttctacctcaggatccaaaatgcccacgccagctgccatggcccctcacaggcagtggacaccagaaagaggagagggagtgcgtgcctgttgctttgaagaacctgacccagaagtcttacacagcacttttgcccacataccatcacttagtcatgtggtagtgcctggccacaagagagactgggaaatggagtctttattctggggtgatgtgtcccatctgcaactgaggggttaaggcctaaaacttagggattgaaggcaggagaaaaaacagatgtcgagagccagtgttgggattgcagggtcctgtgtgggattcctgttcattttcatcaaagaaagtctagttgatatgcaattgttggcctaagtgttattgaggagttaattttactgttgaattacaccagaacatttgtcatgtgaaataactataaatacgactgattattgcctagtgtattacagttctctccagagacacaggaaacaatagggtctgtctatcggaatagatatcctaaaagtgtatcttttgaagagattgattataaggtattggctcatgagatgatggagcttaagaagtcccacagtctgctctctgccagatggagacccaggaaagctgctggtgtagtttgaaggcctgagagctgagggccagtgatgtggattccagtctgaaggtctgagaacccagagggctgagggcaggagaagatccatgtcccagctcaagcaggcagagggagggtaaatccaaccttcctttttctgtttttttgttctaatcaggccctcaacggactggaggatgcccagccaaagtggggagggccatctgcttaggcagttcaccaattcaaatgctagtctcttctagaaacaccctcacagacacacctggaaataatgtttaagatctgggcatcctgggggtctagtcaagctgacacatacatttaaccaccacacttagggaatatgaaaataacttagacattaaatttgattttggtgttgctgtaaagaatacagatcttaggcaccagctcgtaggaggggtggtaaacaaggaggacagcttttaccaggttgcctttggaagcaaaactctgctttgctgttttgttttcaagcggctgcatggccactgagcgagccctttcctgccatcaccacagtgccacttagtgaacagtttctccaaggttaactgtagctgctcttgttcagttaatatgtagttctggattaatatgccacatctgtcactttaaggaagaaaaagagcagttccgtttagagatcccattgctcctctaaggacagcagtcatttctaacaagcagagggaagaaatcttctggttccatttgtcctttgtgtgtgttgaaaaccttgacaacaaaacaaattggtactgaatggtttgaagaaataaacattaactcccctttagtatttcatttctagggtttccagccttggtaacaattaccaagaactttgctgtcatggggtacagctctaggctgctgacaggatcttcatactggaggagactatacttttatagccaattccaactgccccagagataacttggataaacactggctcctccactacctcctaatccctgctgggttttacactgtggggaggtttagacaacttgttttctttcccttttagcccttctctctacactcccctccagctgccttcttcccccacccccaaatgtaacgtgatctcctaggcctgctctgctgcttttgcagattcttttagtcttagagaaagagaggaaaacattaaccattggtttaccaattcaaagttaacaacattttaaacaaaaggagcttgtcaataaccagggcttgggcttttcttttatcagttcctcctacttggctgagtttacctcatcataaatcttatcacacagataataatttgacagctttagggtttttgcagcattgctattttctattgcaacaaagctgtaacattgctatttttgatgtatttgttttatagatatcttaatcttcaatattcagattaaaaacaaacaagacttagtgatttaaaattatttggtaaaaaggtaaagggacagagacatctcatgaaaacatggcaaaatctctttaagtttaattcaagcacttagagtttaataagaatatcccaaaccatttttgcttaataatatttctgtttataattaaaccttaaggtacagtgttgtaactggatttaagaatttagagttttgttgtttcttcgccatcagcgaaattaagatttaaaacctatagtttgcaacaaattttagtttttcagcctagtgtcctaaaacttgtctgtcatgggtacctagtaggtgtcatgtcacaggaaagggatctaacaagggagtttgaagataggggttttccttgctctgccactaacttgctatgtgacctagggcaagttatataacctatctgtgtcacagttgtctgaaatgcaatatggggaaaataaattcttaaaatgacaataaaaagatttctttttttttttgagacagagtcggcgcaatttcggctcactgcaacctccacctcctgggttcaggcgattctcctgtctgagcctcctgagtagctgggattacaggcacacaccaccacgcccagcaaatttttgtgtattttgtagagatggggtttcgccatgttggccaggctggtctcaaactcttgagctcaaacgatctacctgccttggcctcccaaagtgctgggattacaggcatgagccaccacgcctggccaaaatatatatatacatattttaagtgaagatgtgtaaggactaaaggagcccaaaggagacagtaggggataagaaaggcaaagagagtggtaatagatttagcagaatcaaggatgccaaaacctcttctgagagagaccttgattaagagtgagctggtttgcctgtaagaatctgcggaaaggtcagaaattagagacattagtaccacagaaagcaggggatgaggcctgaagctgaaatcaaggggatcaattgagagcctataaaaggagggtttagattcttcaaacccctcccaaccccacagagtcagatgaccacctctcctaaccacctacaggagaccagaggcattatattgagaaatgcccggccgggcgcggtggctcacgcctgtaatcccagcactttgggaggccgaggcgggcggatcacaaggtcaggagatcgagaccatcctggctaatgtggtgaaacaccatctctactaaaaatacaaaaaattagccgggcgtggtggcgggcgcctgtagtcccagctactcaggaggctgaggcaggagaatggcgtgaaccctgaaggcggagcttgcagtgagccgagatggcgccactgcactccagcctgggcaacagagcaagactccgcctcagaaaaaaaaaagaaaagaaatgccccgtagaggctctgcactcagaagcctgacccccagcatgggtccgggtaggccattggccgaaaatagtggagtgggcaaagagcagattttttaaaagtctgcatactgaatagtaagattcccagccctcttctaatacctgctagccaggggcctaataaggaagagattgaaatattcttttctagggggaaaaagttgaatgaccctagagaaaagccctacagataccaacatttagggattctcttgaaaaagcgagtttaccatctcctttcactgaagcttaccagtggctgtgccccttccacgcatacaaaactaacagtcatcttttagttgctcattcatagagagtgagtggcctgccaaatctctctaggcattagaggaaggtctctaacctgatattaatagataaagggtaaaacaaatagcagaaaacaggaacttggtggaaataaagacaatgcagtcaacagaggaagagtttaaaagaactattcagcttgggcaccatgactcacgcctgtaatcccaacactttgggaggctgaggtggacagttcacctgcggtcaggagtttgagaccagcttggccaacatagtgaaaccccatctccactaaaaatacaaaaattaactgaacatggtggcaggcacctgtaatcccagctattgggaggctgaggcaggagaattgcttgaacctgggaggcatagcttgcagtgagccaagattgcaccactgcattccagcctgggtgacagagtgagactctgtctcaaaaataataaataaataaataaataaataaataaataaataaagctatgcatttcccacaaatactgcttaaaaaaaaaaagaactattctttgctatccttggagagagagattgcaaatgtcagaaaacaggatgcttttaaaaacaataacaatcagaataagaataaaaatgaattatttttcttttatttatttatttatttatttttgatacatggtctctgtcacccaggctggagtgcagtggcaagatcacagctcactgcagccccaacctgcctcagccccccaagcaactgggactacaggcacgcaccaccacacctggctaatttttaaattttttgtagagagatggggtctcactatgttgcccaggctggtcttgaactcctgggctcaagtgatcctcctgcctcagcctcccaaagggctgggattatgggcatgagccaccacaacccagcaagaatgaattgtttaatattaaaaacattatagcccaaatttaaaatccaacagaagatgtggaaaattgtctcagaatgtattgggttggtacaaaagtaattggggcttttgccattttaatgacaaaaacgttgattacttttacaccaacctaatagaacataaagacaaagacatggactgttgagagaacaataagagagaacaggtaagaaaattagaaactctcgggaggctgagacaggataatcgcttgaacccaggaggcagaagttgtagtgagccgagactgtgccattgcactcctgcctgggcaagcaacaagagtgaaactgcgtctcaaaaaaaaagaaaagaaaattagaaactcaatcccagggctttaatatcctttttgtaggaattccagaaagaaaacaaaaaaataatgataataacgaagaaacaaatggaggagaagttaggagacgttaaatgtaaggaaaaatttcagagtttagtgaagtgagtattttccaaaacagaattatataaatctctggatttatgagtgcccagaataatatatgaaaggccatatcattgtgaaagttcagaacaccaagaatattagaagatcctaaaagtttccaaagagaaaaaaagcaagtcattttaaggggtcaggaaccagaatgggattgcatctctaaacaatacttactggaaactagatagtagcagataaataaatgccttcaaagttcatttgggaaaattattttcaacctagaattctatacccagacaaactgtcaagatagaagaaaggtatttttttagacatgcaccctccctccccacctctgtgaagctactggatgatgaattccagcaaaatgaagaagtcagtcaataagtagaactgagcccgggcacggtggctcacacctgtaatcgcagcactttgggaggccgaggcgggcagatcacgaggtcaggagattgagaccatcctggtgtaacacagtgaaaccccgtctctactaaaaatacaaaaaaattagcagggcgtggtggcgggcccctgtagtccgagctactcgggaggctgaggcaggagaatggcgtggtgaacccgggaggcggagcttgcagtgggcggagatcgcgccactgcactcccgcctgggtgacagagcgagactacgtctcaaaaaaaaaaaaaaaaaaaagtacaactgagaatatttgaaatgttttagtgattggaaaaaatatcactagatgtttgacagatctttgaagtatttgagggaaaatggtgataggtatatagaagactaaatgaaaacaaggcaatatctctaggataaacaaagatgtataataaaggaaacattcatagtatattattggctaagcagtgaagaatatttatatcatcctaataatgtaaacactaactattgatttatcccccaaattgtgattttattgttttggggggttatggatggtgatagtataatactgctgtcataagttaatagataatggataaatctaatgaattcagaaagagcaagatgatgttactagctaaaaatctgaaggaggctgtctctgcggaaacatacaggggaaagggattgctgttttttattaccagatttttacaagactatttttagccttttttacaagacttttagtactgcttgagttttaaccatgttatgtatattactttgattaaaaagaaaaattaatttaaaaaaatgagcatactaataccattaattttctccttctagagaaaaatgtttaacagttaggtttagacttgttaattataaaaatatagtagtcttactgtaatgagattttctagaaagcggatttactctaaggcagttcagatttggtccccagctgagaattatagcctggaaataccaacagaaaaatcagtgtcatttgaaggacagtcatctgtgcagcctgtgcatgaaatcatgggtctgaattaggcccccattcaagatgcgggggtgtggggtttgtgttttgctgaagctgtggttgcaaatctttgctttaggatgaaaggtggggctctctgttacatttgaaccttagttgctactcctacctcacagctagtgtttctttctcttcataaaataaattgatttcctggtcccttggaaaacctccagactgctttctggaatcattttcatatagcatgtttgttaatttgagctcttgactgagtcccagtgagatgtaggcaggaacacagacctgatacagaaatagtcctcttttggaaataacaatagctactgtttatcgagcaccttctgtgctttgggcactctccctacatgattcctaatcttcataataaccctgtgagataactactcttatgactacctcccatttttcagatgagaaaattgaggctctgagaggtgaagtcgttgcccatggccccccagtgagtggcagatctgagactcagcgctagcctttgtgacacataactcgtgaccagcaggtagtgctacccgattgaaaaaatgtgagacttaaagggatgcatgtgtccctatacagtggcaaaaactggtatgacagaaatgatgttttaagctatgttatcctttagttggacatacactggacccacagagctagagtacctggcaggctcttgctggacaatgtttgctgaatcagagaaagtgggctttgttggcatttgcatgtgaaatactgtgcacatacctcaagatctttgctgttccccccctaaagctactagctatgctggaaacagtgaaggggtcagccagacctggggtcaccttgtcctggggtcccaagccaggcctcctgtcaggttcatctgtctctgttccacctgcactcacacccagtcttgctgctgagagatggagcatccacatcctgaatcctgcctccttcccttgacacacttctatggtgggtgcctgcccaactttttcttaataggactaaattccaaattaaaaaaaaaattcagtctctctcctctaatcatccaagaagagtcctcttttggtaacttgttctagaactatgcctatcttaaattcagaaattgctttcaaatgaattaaattttagaaatatccattcctgttcgtcctattcccagtgaaaataagcaactcttccctcttccaaaacagtggatttcttttctttttttctttttttgaaatgtagtcttgctctgctgcccaggctggagtgcagtggtgcaatcttggcacactgcaacctccacctcccaggttcaagcgattctcctgcctcagcctctcgagtagctgggattacaggtgtgtaccaccatgcctggctaatttttgtatttttagtagagacaggatttccccatgttggccaggctggtctttaactcctgacctcaggtgatcgcccaccttagcctcccaaagtgctgggattacaggcgtgagctactgtgtctggcccccaaacagtggatttccatcttacatatgcatacagatcatctgggagcttcagatccagcccattgcacatattctgattctagactagaaaccaagactccgcattttaagcaagccccacattattcaaaatagattgtccatggattatgcttttagaaacattgttcagatcccatgctttaatgttggggagtttatcctttccttctaaatattttttttttttttgagatggagtctcgctctgttgcccaggctggagtgtggtggtgcgatcactgctcactgcatcctccacctcccaggttcaagcaattctctgcctcagcctcccgagtagctgggattacagatgcccgctaccacgcccagctaatttttttgtacttttagtagagatggggtttcaccatctcaaaaaaaaaaaaaaaatcttaaatagctctagttccctgaattattttctcctaagacatgttttcccaacagttaatgttacttatttcatcttctgatcttactcatattatccacctttcacttaaattggaaattttctgccattttacaaagttcaagactttcctaccttcctacctcctggctgtgtgaacttggacagaatacttccccctctcccttcagtcagttttcttacttgtgaaatggaattaaactatacaaaatcattaggttactgtgaggcttaagagtgcctggcacatattacatgcacattaaaaatgtatttcttcccaaactaatgcaacatagcaaacaagttagttcacagtctttaatttctttccttttccctttctttttagctaatagcttttgggtcttaggctgattagaaggaatccttcttggggtgttcttctggtaagaagattgaagctctcctttatttgcttgtaacagaatgctcttcgtatctttcaaaagcgtcaaaagctggatatggaaagtataggccaggtttgatacagaagtgtagtttggcagttttttcagtatccattgccactaattcagtattttgttagatctgttgatgtacggttttataactaaaattaaaaagatttgggtacagtttataagcattattcattttaagaggatttaagaggataagaccattttagactcgagcagaatattagtaataataattagcttaaaaaaataaacatataccaatataaagaacagcacaaggcaagcaaatatctgggcctatattaacagacggtattcaaggatatggctagaatttccaaaatgcctaataatgtgtaattcttggcattaagccgccaatttgaatatggccctttaatatgaaatgctatataatgacagactttattatagtctgatccaaggcccctgaactttccaaaagggcaacaaaacagacagatactgtattttttcactagttggtactggtggcacccttttgagtgttatttttggcattacgtgtagaggttgacagattcaagacaacactaaacatgttagcagtcaccacacgcaggctgtccagcagaatgacagcgcctcccagatcctagaaagcatccagagtcactgcacccatcccctgggggccctgtagtcctgcatctccagatgatgggagctgcaaacttccctgatggtgccctcttggatgctcatgaggcctgatctggtaccacgactctagcagtaggtccattcaatggcagtaaaaatacatgttgtatgttgatcagaatttggcaggacacatgtggaaagttaatgacatcctggccgagaacccctgtgatatacactggttacatcctgtccaactggagtttttatgtgctgtttttggcagagccaagtgaagatcttgttacttagccattcctgaggtactgaagatacccgggtttttgtcattacaggataggctagaaagtagccagggtctcataaccaaggctttctctgaaacatataatgacaatgctagttatttgaccaaagatatccaatgctttaatccacttggaatttattcttgatgtgaagggtcagcatcatccactggtcgggagcctgatccttggagccaggcagacctgggttgagtccatctccgcctgtttccagctgtgggcaaggtgtctgacttctctgagcatctgtggggtttgtttgtttttaaacctgaagaattgggataatctgtttcctcacagaatcattacgcagatgcaatacagttaatgaaggtaacatggcacataggaagagcacaatacacgtcagctcttactcttcatggctagaagatgtggactaaacttccccctttacagttttgtgattaacaccatttatgaaagaaataaatgaaataaattccttttcctgtcatgaggggaacttacctgattttattgaattatttggtgccattgagttccttattgtttccctctgacctagatttctgggtgtgcgccagtaacacgactgtgattgttgctgctttataacattgtctgtggtcagtccaaacaagagtttaaaataattgaatgaaatggattttaaacaatggtccccccaccctcaccccgtggcactcggccaaaggaagaggaaaagttctctgttaaagaaaatgaatcagagaagaggcccagaccgtgcctccgaaaattctcattgtagggactaagtcctctcactctgaactcacacccgtctgttcgcagcctcacctcatatcctggtctggatgtgcggcctcaccggggtgtcgtgcgcacgtgtggttgtcctgtgggtgccagctctgacttcctccccagacacccactgcctcagccttaatcacaggacgcgcgttgagtagaaatgagaccagttagtattggtaactgcagaggaatttgcattttcaccagcgttctcgggtcagagggtttgcctggcaccgcgtactgggaaactcgccaaaagcggtgcaggttggagacgccccaggccgcggtggagttgcgcgcggcttctaaagtggagtggagcaggcctgcaccctccccgccggggctgggacggcgcttccaggcggagaaagacctccgcgggccgcgcgcggccttccccctgcgaggatcgccattggcccgggttggctttggaaagcggcggtggctttgggccgggctcggcctcgggaacgccaggggcccctgggtgcggacgggcgcggccaggagggggttaaggcgcaggcggcggcggggcgggggcgggcctggcgggcgccctctccgggccctttgttaacaggcgcgtcccggccaggcggagacgcggccgcggccatgggcgggcgcgggcgcgcggggcggcggtgagggcggctggcggggccgggggcgccgggggggcgcgcgggccgagccgggcctgagccgggcccgcggaccgagctgggagaggggttccggcccccgacgtgctggcgcgggaaaatgttggagatctgcctgaagctggtgggctgcaaatccaagaaggggctgtcctcgtcctccagctgttatctggaaggtaagcccgggccgcacgggttgggctgagtagccgcgcgccctcccgctgctgctgggcccttcctaggcctcgccgcccgcgcgctcccgcctgcgccctccccgggtcttgtcttttttttctttcttccctcttctcttctcttctcttcagttctcttatattctgtctctctttctttctctctgtgtctgtctcttttctcttctcttgtctctctctttttctctctctctgtctctttctctttctcgcgatggcccctaggcgccgccggcggagcgtggcccccagccccggcaccagccccggtagagccacgccggatggtgacggcggcgtccgggaccccacagtgcgggctcccccgaaaaagtttgagaaagccaactcgccaggccttaacatccctgggatcccacgttgtggaatttccaccgttaattgggactgtgtgttaaaaagatcgacccgtgtttgtgaaaacatgcgatttccattaagcatcatgtacacaaggagcaccactctaccatttatggatacagaatttcaagtgatctttccatctcccccacccccatcttatctacagaccacgaagaggtcttaggaattcgctctcttttcaggggaggggagcccatttaagaaggcgtttccaaggagtcccccagagtactggggtgtcatgttcgtttccttaagtgaagctcagggccaggagggcttcacttttgcgttctttctacctactctccttctctaattacatctgttttattttatttttctttcctgttgtagtctttagttttataaatggaaaaaaagtaaattaagggttatgggtcttcactttcgtagcttctaggtgggtatgaaattgatctgatttgagactggtgctcccagaccattgccttcagcagaaaggctatctgtgcttcagagatggagttgcacttggacttctctgttgttttcaactaagaatataagagtaaaaatgtggccgggcgcggtggctcaagcctgtaatcccaacactttgggaggccgagacgggtggattatttgaggtcaggatttcgagaccagcctggccaacatggtgaaaccctatttctactaaaaatacaaaaaattagccgggcgtggtggtacacgcctgtaatcccagctactcgggaggctgaggcaggagaattgcttgaacccggcagggggaggttgcagtgagccaagatcgcgccactgcactccagcctgggcgacacagcaagactcggtctcaaaaaaaaaaaaaaaaaaaaaagagtagaaagaaatgtgaagctcactttagatcaagtaggatttctgctagaatgccatgtttttctttttaaaaaagcaggagaaataaacaggcctcatttattttctaacctatttttctttccttaacctctgactctaccctgaaggcctgcttggagtcacatatgcagatcgcactagtgatgtgggtgaaacctgtttgcccttcttgccacagtttgtgtacctcactcctcttctgtctctgggattccagggggctgaatggcccagagaaggctcatctaggtggagtgggctcacagagcctagcatttggagggtggagattgtttatttgtccctaaaagttgatgtctgagcattccaaatcatcttcaattaatacatcgcttattttttccaagttgctcaaaattctgagcacattctcatttacatctgtatcgagttagtgttaggcatcatcatctccactttgcagatgggtgcctaaggcggggatgaatggacttttgtaagtgcagagctggagcaaagtttaggtcacagctttgccaagtcattgttttgttttcctgggagtaaaccggagatttagtatggacctggctggtttaattattgttttgggaaaaaaatctaaaactcattccaacatgtcttgaaatgaattataatgttgactctaaagtctcaaaaaaaaaaaaaagttctagtacagcagactgccttgggttaaaccttcttctaggaaggtgtcactctaggaattctttcttactgagttttcttcttttcgttgttatagttaattagagaaagtaaatggaattatcattttgtagttggtagactttaacaagcctcagcgatagtcttttaaagactggaagtgctatttgtcttttgggaaaaatagttcctaacatctggatgagtaatccaggctttccactttcactgacagcctaaatcagtcaatcagtgtcgatcagtcagtcagtgtttattgacgcccactcagggtcccaggcattccctgtcagggagagaattgaatgagatcaagtttttcattgttctatcaaagaagcttccaccataaatgtggtttgatggtgcatgctacctgctactcagcctagctgtcaaagcaacactggtaaacataaagatggctagcaattattaaatgcttactatgtgccaaatactgttttattactctatgtgatctgatatagttatatttcatgatagcactatgattatttccattttatagatgaggaaactgagtcaccaaaaggttaggtaacttgtctagggtcacagagccagtgagtgggggtactggaatttgaactcatgctatctggcttgggagagcccacttttagccactggatgctctactgatgtctcttttggaattcactgtgattttcaaaatggtatctccagaaactcctccaattaatccctgaaatgtaagggtagtctctttttcttttctagaaacctgatcctggcaaaatgattagctttaacagtaggattaattttttttaaatgtatataaaaatacttgtatgtaagaaatcctaaaagggtatttagtgaaaagtaattccctctcctattcattttccccacctagaggcaatcaccctggagttttatgtgtgtccttctagaaatactgtgtgcacatataagcatttattataacatgtgaattttgctctccagctttttgtgaatatgcatgtttatagcagtatctattcaccaggaccgcatttagctttgcaatattcggtctactttgaacactgaattttctgattatttctttcccctggagacgtcaaagaaaacatgaacactagccttttgaattcagggttttcttttcattttattttcatttgttcatgtgtttgtatttacatacattgtgcctgaatattgtacatgtatgtgacagttgtgtactgtagaatcaaaaactaatgtctgtgaactgaactcttcttgaactttttgttgttgttgttattgttgcttttggagatagggtcttgctctgtcacccaggctggactgcagtggcacaatcacagctcactgcagccttgagctcctggtctcaagcaaccctcccacctcagcctcccaagtagctggggctgcaggcatatgctacctgactaattaaaattttttttttttttttgtagagacagggtctcactatttttactagtttgcccgggccaagccagtgttgaactactggcctcaagtgatcctcccaccttggcctccccaaagtgcatccctacaggcatgagccactgcactcagcctgaactttcgaaatttattttaagggcccacttttaaatgcttcttttcagcagctaactttccagcggatgcttcatgtggtgccagccatacagatacgcttttagaacttgagctttggagaagcttatgcttgctttctgctctctcctgaggtcatcagatacttcccttgttcagtaacaaagaaagtgagactctttctgttacctaataaaaggccagtctgtccatttcattttgggtgctattaacattgttgaccatttacaatgtcacaggccctggcactgagcacatcatgtgcagcctcacttaattttcacaccagtgccctgaggtttctagaaaagaggaagggccccagtttaggtggcagtacttttcaatttggaggcaggagatcccagttttcctctgacctctctgagcttccgtgtttttacctctaagacagagagaccaatctctgttcagccaccttagaggattgttttgagggtctataagatgattgagggaaagctctgaaactggtaagagttaaatgtatgtttgtgttatgttgatacgagattcctctgagatgctctttagtccaggcaggtttatggctcacacagcgttcctagggtctcattcttctgcacaggcaggcagctcccgagccagccagtctggacccaaatgccacctgtgctcttggctggtcttgcgcattcaccgaggctcactgtaccttggtgttcccatttctaaaataaggcctgtagtaatccctacctcactgagttgttgagagacttcatgtaaattgtttagcagggagcctggcacagaacaagagcctagcagaaaagtaagctgttgttactttaagcaaatatttagcagcctaaaatggtggctttaccagtttctgtaatggttgaagtgatgacagaattcagccaatcccacccatagtttttcttgctaataaagcagtttgtttctaagtgtgttttgatgcgtataattaatacttcctgtccttgatttttggctgaaaaatgtcttctcttcctcgcaccctctgttattcccgtagtgaatattttcattgtggaagagaaattcccattggctcatggttggcattttatttctcctgtccagagacaatatttccacagcctcaaacgtgaaaactgaaaatctggtgccacttaccaccttgtaaaatcaagtcattgtaattgtgccagtataatcattgatctgaaataaaagcagaaaataaatcaatgggtagctttcttaaatacataagaactaaagatcaaatgggatattggaagactttaacttttcctccataatggtggatcttaattaaacacacagaagaacaatttataaaataaattcataggtttgtttgttcttttttagtgtcaatttttaaaactatctcttttttaattaaaaaaaatagagatgggtctcactatgtcgcccaggctggtctcaaactcctgggctcaagcaatcctcccacctcagcctcccaaagtgctgggattacaggcatgagccactgcacccagcctaaaactgtctcaaaagtagacagcataatgaactcccatgtacttatgatgtggctttaacaattatcagcttatagtcagtcttgttttcttacataataaagttacagtttcaaagccattaggaagaatagcttgctaattataattacttagttttgatagtgtaactttgtcctcagatgggtagaatcgttactctggaacaggggtgtccaatcttggcttccctgggccacattgggagaaaaattgtcttgggccacacgtaaaacatactaacgatagctgatgagctaaaccaacaaaacaaatcccacaaaaatctcatttctttttttttttgagacaagagtctcactctgtcgcccagactggagtgcagttgcacgatctcagctcactgcaagctccgcctcctgggttcacgccattctcctgcctcagcctccctagtagagggtactacaggcgcccgggggtttcaccatgttagccaggatggtctccatctcctgacctcgtgatccgcccacctcggcctcccaaagccctgggattacaggcgtgagccactgcaccgggccaaaaatcttataatgtttttaagaaagtttgcaaatttgttaggccacattcaaagccgtcctgggccatatgcagcccgtgggccatgggttgaacaagcttgctctagaaattggttttcaggccgggcgcggtggctgacgcctgtaatcccagcactttgggaggccgaggcaggtggtcacctgaggtcaggagttcgagaccagcctggccaacatgctgaaaccctgtctctactaaaaatataaaaaattagccaggcgtagtggggagtgcctgtaatcccagcactttgggaggctgaggtgagtagatcacttgagaccaggagttcaagaccagcctggccaacatggcaaaaccccgtctctactgaaaatgaaaaaaaaaaaaaaaaaaaaaacttagccaggcgcagtggctcacatctgtaatcccagctactcaggaggctgaggcaggagaatcacgtgaacctgggagctggaggttgcagtgagcctagatcgcaccactgcacttcagcctgggcgatggagtgagactccaactcaaaaaaaaaaaaaaaaaaatttcaattggcttctattaaagcttttttatgtttgtcattgttttctagtaataacaacaatccacattttttgtgagaaatataccataatatagagaagtataaagaaaatgtaaggccagacacggtggctcacgccgataatcccagcactttgggaggctgaggcaggcttatcacctgaggtcaggagttcgaaaccagcctggccaacatggtgaaaccccatctctactaaaaatacaaaaaaagtagccgagtgtggtggcgggcacctgtaatcccagctactcaggaggctgaggcaggagaattgcttgaacccggaaggtgaaggttgcagtgagcagagatcacgccattgcactccagcctgagtgtcaagaacgagactccgtctcgagaaaaaaaaaaaagaaaagtaaatttaaagcacttaaaatcccaccaccctgagttaactactgttcacagtttggtgaaattcctcctcgtcttctattttttcatagttgggaccatgcctatatactggaatgtaatataaacacttaatatattattgcgagtatattctcaaacttaaatattttttccaaaaatattttgagtggcttttaaaatatatcctattttatgcatgcagcataaactaacttatcctgtgttgatagatattttgtacttgcccttttctgtgctgttgtttaaaattagtgtatagaaataattgtgttgatcacttaggataaattcctagaggtaaatcagatattaaattctttatagacttctggttcatattccagttgccctcaatttatacacctactactagcattgtatgagagtgcccgtttctctgaaatcttacccacactggctgtcagcgtcaaaaagatgtatctgcagatttggcaaggaatttgcatttcagtgattattatcaagcgttcacacactttccatgtttaatggtaattttttttgtttttttttgagacgatgtctcactctgttgcccaggcagagtgcagtgccgcgaccttggctcactgcaacctctgcctcccaggttcaggtgattctcctgcctcaactccttagcagcttggattacaggcatgcgccaccatgcccggctaatttgtgtatttttagtagagacggggtttcaccatattggccaggttagtctcaaactcctgacctcaagtgattgcccgccttggcctcccgaagtggtgggattacaggtgtgagccaccgcacctggcctttaatgataatgtaaattttttgtgaattgtttattcgtggctttgccccattttttccatagtggagggatttttctttttcttgttggtatgtaaagtccttgtgtgtcaagaatgctctgcctcacagtttttctaatataatgacagtggaagctcgtaactggcttccacttgactgacttgctaaattgaccggcactcttcacttccttataaaacatgcctccatagtccctgtgccccatggcacatgggatggggtagccacactaccactgtctgctgctgcatatgttcctgtccacaagagccagtcatgtttgtttccaagcctggttctttcagatatagctgttgttgtaattacttggttgatatgaaaccaatgaaatgcaagtgtgaaaagagaattgtttctaggaaaattaagatgaatgctttagaaagactcagtaaaggaagataaatttaacaaattactacagaattaggtgtaagacaacagtaaatgattggaatgaattacagaaatctagaaagctttgacagtgggaatgcgtagtgaatggctctaagttctccctccatctgtaggaaattgaagctggaagtgagatgatatattcattatagggaggacttacagaagaaaacatcaagctctaatcacatgtccacatttcgttttgtttacttattttttgaaatggagtctcactctgttgcccaggctggagtgcagtggcatgatctcagcttactacaacctctgcctcctgtgttcaagcgattctcgtgcctcagcatcctgagtagttggggctacaggtgtgcaccaccacgcccaactaatttttatatttttagtagagacggggtttcgctatgttggccagcatggtcttaaactcctgacctcaggtgatctgcctgcctcggcctcccaaagtgctgggataacaggcatgagccaccgcacccagccccacatacctacatttcaaaggacagtctttggccctacagtcaagactaccaaaccaatgtacactaaatgggggtggggatcacgttgttgttttttgtttgtttttgtttgtttgtttgtttgtttgtttttttgagagagtctcgctctgtcacccaggctggagtatagtggcgtgatctcggctccctgcaagctccgcctcccgggttcacgccattctcctgcctcagcctcccgagtagctgggactacaggtgcccgccaccacgcccagctaatttttttgtatttttagtagagacggggcttcaccgtgttagtcaggatggtctcgatctcctgacctcggggatcacatattttaataaaattgataatccctaatagtgatggcgctaggtgtacttttagagccaatgtaaatagtcgagaaagggggccaaacatatgactaagcttcttctacactctaggagatgtcagtattgcaagatcctgttccttgaaattatctttgccccccgccattcagaaaaattaccaaatattgtaataatgtaatttaggacttaccctttcagagaaacagttcctgaaggttgacttcagttagtagtacagaagcgagacttgaagctcttcatggtttatgttctgttggtttatcccaaagagatgttttagagcacattcatttctgaaagttctcggtcatgtttccggaagtttgatcaggtgggttctttttctttttttaaaagataattttttttttaaagataattcagaatcagtcccacccctgagatggtattattacccaggaaagaatgcgtgaggatcctctaaatccatagagaaggaaaactaaaacaattttgttaccatttgtttggctcaagcatctggtagatccttcagttcttttcaaattagaattttcctctctttttcttttttttttttttttttgagatggagtcttactccatttcccaggctggagtacagtggcacaatctcggctcactgcagcctcacctcccgggttcaggcaattctccggcctcagtctcctgagtagctgggattacaggtacccgccactaattttcatatttttgcctggctaatttttgtgtttttagtagagatggggttttgccatgttggccaggctggtctcgaactcctgacctcaggtgatctgcccacctcagcctcccaaaatgctgggattacaggggtgagcctccacgccgggcctctctttttaagataataaaaattactaaacatcataatgacatgatttgggattactctttcagagaaacagttcctaaaggtttacttcagttagtgatttttatttttattatttatttattttttgagatggagtctcactctgtctgccaggctagagtgcagagacgagatctcagctcactgcaacctccgcctcccagactcaagcgattctcctacctcagcctcctgagtagctgggactagtagctggaactacaggcgcccgccaccatgcccggctagttttttctattttagtagtgacggggtttcaccgtgttgcccaggttggttttgaactcctgagctcaggctcaggcaatctgcctgcctcagcctcccaatgttctagggttacaggcatgagctactgtgcctggcccagttagtgatttttaaattgtagttccttaaatgagtattttggatttcactccacaatgttcttcaactgtaagatctacttgaggttatttgatttgctggtttgcaagaactcgtctacacgttgtctttatcacaaagaaattctggagcatttgagccctgttcaaaaaaaaaaggcaagaagaaacttcaggaacaaataacctatttgaccctgtaatgaataatattcacacattttctaatttaagagctgttgattgatttccaacttttagaatctgtttcagacaaaacatggaagtttagtaacagttttttctattctgtaataataattgccacaaggttaaaaaaaaaaatttacagaagaacatatttgagggtggtcgtgggggcaagaaagctggaaggacgggtggggtgtgttaatagccttgtcttgtgaagtaagtcctcagagacgctgtcctagttggaagaacaggcagtgaaggtgtgcgtctgttacggagaataggactccagtgatctagctggtacttagagaggtgggggtgatcaccaaaaaaacagctctgcctctgggagcggagaggactgggatagaaagtatttgtctttcattttaagcccttctgtacgatttgacttttcttttttttttttttttttttttttgagatggagtctcactctgtcacccaggctggagtacagtggcacgatcttggctcactgcaacctccgcctcccaggttcaagcaattctcctgcctcagcctcccaagtagctgggactacaggcacctgccaccatgcccggctgatttttgtatttgtagtaaagacaggatttcactgtgttggtcaggttggtcttgaactcctgacctcatgatccacccccggcttttttttttgacacggagtttctcgttacccaggctggagtgcagtggcgcaatctctgctcactgagacctccacctcctgggttcaagcgattctcctgcctcagcctcctgagtagctgggactacaggtgtgcgtcaccatgcccggctaatttttgtatgtctaatggagacagggtttcaccatgttggtcaagttggtctcaaactcctgaactcaggtgatccacccaccttggcctcccaaagtgctgggattacgggcgtgagccaccatgcccggctaaagcaagaaattttcattgcatattttaagcaaaggcaaatgcatatgtggatagactgttttaatttgactaaagtcatattgaatccatgaattttagaagctcaaactattggggaacaataattaccaccttggagtgaaaatacttaatttccacaagatttagtaaaggaagagttttttaaaaaccaccttaatgataatagtatgtacagatgttaagaaatgaaataggaatgtgtaatgttggaaacacaaatatttttgcttctgagaataaaactaattttttctcccaattttctcttcctttttcttttttctgttcccccctttctcttccagaagcccttcagcggccagtagcatctgactttgagcctcagggtctgagtgaagccgctcgttggaactccaaggaaaaccttctcgctggacccagtgaaaatgaccccaaccttttcgttgcactgtatgattttgtggccagtggagataacactctaagcataactaaaggtaaaagggttgtgggcagctagtggtggttgcaggagatagaaatctgggaattgcggtttgacctaccaccctttgctcgttaaaggagcagctttgaaatctggactgcagggatatccaaaacaacaactgcatgtttctaagggagtcgactctccttagaggagttcttgtacaatagccctgggcaaaaacagaacttgccctattttttatactgaaaaggacagctggacaaaatactgaacgcaatttttcccctaagaaaaagcattatttccctaaaatgtcttatattaggaacagagcacttgaataaacataattgatttataaaaactgaggctatacacttacctatctgttcagtacaaacaggaagcttcaaatgtaaacgtgaattctcatacacttataaatgcatatctttatgtggacttgttaaaatgaaattggtatttaggaatttggagatttttagtagttacacaagaatcaatgaaaaagaacgaagctggtttccaaagctgatatgtctgatttggttcctttcttctcaggtgaaaagctccgggtcttaggctataatcacaatggggaatggtgtgaagcccaaaccaaaaatggccaaggctgggtcccaagcaactacatcacgccagtcaacagtctggagaaacactcctggtaccatgggcctgtgtcccgcaatgccgctgagtatctgctgagcagcgggatcaatggcagcttcttggtgcgtgagagtgagagcagtcctggccagaggtccatctcgctgagatacgaagggagggtgtaccattacaggatcaacactgcttctgatggcaaggtaggggacccttggcagggggcgctgatgggcccagggcaggggaaccagaggtcctgctgtcggattgataaattattgcaagaaagctcaaccaagaagatgtttaaagaatctttcaggtgggagtcattccattagccttatgaagaccctttattgaggatccgttctgtgatattacaagttcctgggactggtatgattctcttattgtcttgctagagttttgttgttagcaagttacttaaaataggaggaatatctgttgggttttggacacattttttacaataagattcttcctttaaaaaaaatattttataatgatagaaatcatccccaacgagaaaaattcaaataatagataacctttcttagagcgaaagaccactttactatcccctcccccacagacgcctggcacgtgggcttcttcctgcggatgaacacattcatggagaggtgtgtggacatacgtgcatacacgcatgcagttttcagtgaaaaccgggatcaaacccacagcttaccaaacccaaagtgtggtgttgtaagggaggtggcctatatgattttgtggtcttcatataaataatccttaagagtccataaagagaagggaggagttaacattgactgaggtattgctataatacctgcatctttgcattaaagaaagggaggcataaagagatcttgcccgatgtcaacctagtgagtcactgatggaataggcttggatcccacagtttattctactgcaccaggctgtagttgaggtacagtgttgataggtggtcccgatggtgtatgtttgtttgtttgtttgtttttgagatggagtcttgccctgtcacccaggctggagtacagtggtgcgatcttggctcactgcaacctctgcttcccatgctcaagtgatcctcccaccttagccttccgagtagttgggaccacaggcgcacaccaccatgcccagctgttttttgtttgtttatttgttttgagatggcattttcgctctcattgcccaagctggagtgcaatggtgcgttctcggcttactgcaacctccacctcccgggttcaagcatttctcctgcctcagccttccaggtagctgggattacaggcatgcaccaccacacccagctaattttgtatttttagtagagacagggtttcaccatgttggtcaggctggtctcaaactcctgacctcaggtgatccacctgcctcagcatcccaaagtgctgggattacaggcgtgagccaccacgcctggccgtttttgtatttccagtagagacagggtctcgccatgtcgcccaggctagtctcaaactattgagctcaagcaatctgccctcctcggcctcccaaaatgctgggattacaggcacgagccactgtgcccagcctatattttttaaatagtatgtaatgcatgcatatggttaaaaaaaatcaaaagaacaaaatgaattacagtaaaaagtaatcgtctcctaattcacttttcctgcccagaggcaagcactggtactagttccttctagagttacctggacacagatggatggtatatagatgtttatgtggatgtttatattcaaaaaggcacgcaaatgatacatgcacgcgaatgcatcatgcttctcccgtgtgataatacaccttcgagattgttttatggcaacaggtttagagctgcctcattcttaccagtgactgtgtaccgtggatggactgtcacttatttcagtagtcccctgctggttgacttttaggttgtttccaatctttagttattgtaaataatgctgatatgaggtggctttcaaaccttttcaaaaatctggttctgctgtaagaaaaactcattttacaccaccacccagccctcacaatataacaaaagtttcatgaagtcttacctacccttactgtatgtaacgcactctgatagtttgtatttcattctgttctatttcattttttaaaaattctggttgtaatccactaaatttatttcatagactgactagtggcccatggcctggtttgaaaatgcgttgcacgtgcttctttatgtgggtgtaagtgtgtgcagataagttgccagaactgactgaaggttatgtgcatcaccaggtcaccctctatagaaattgtacaaatttgttctcccacaaacaatccatgaaagggcttgtttccccttaacccacaccaacagtttattattagacatgtaaaaacacctttgtcactctgactggtaaagaatggcatctcattatgttgaatatccatgtggcatattttgggtcatctttatgccatttagtaaattcatctttttcctacatgttagaaatataccaagtgtatatgtgtatctaggcctgttgacctctctgttctcttccattggtctgtctatccgtatgccagtaccaaacttgtaattgctatggcttcataccatgttgtggtatctgataggctagtccccacttacctttttaactttttttttttttggctgtcttcacacattcacttgtaccatatgaacatacatatacttcctttttaatgttcttatttttcttcacatcccaaagtcttctggctgaaatcctattgcccatatctgatgctttccaccactgcagaattctttagtaccaacactgcagtgtgcgtgacggacaaaagagcctgttatccctgtgtgactagacgtgggcctgtcagcttgctttttgggttattgttcttatcccagaggtggagctgcgttcttccattctgagggacgtacttcaggacattgggccctttgaaagagccttcagaccacaagggtacctttctagtgaatcagaacaccagggtgcaccgcccatggggggtgattttctggagcagacagcttgcttcccatgtgtgctatttatccaaggcaagtcatgctgcaccgagatagtcacttgaggtttgcaccgaacaggataatggtttcttttccctagagctgtttaatcagcaaccttggaacagatgcaggcaggcatgatctagtgtgacagctcattagctaggggttgatctaaaatactgttcaaatgggcaaggaaaggcctgcgtatgggatatgtgatttgcagaatttgagattcatccaaagagggagaatctgcctaagatgcctctgtctaaaagctagtatgtgccaggtgggtttgtttcattccaggtagagcacagggagcttatgtgaccaggcagtgtccaccattgggcaacacatcacacttcccttggcgtcttgcctcctccctccccgtctggcacagactctcccatcagccgtttgggcacctggggacttctgagcccacagcgtcatccagcagaccgtctgcggaggttccttcctgtgagggccgcactcgagggggtgtattgggtgggatcgtatcactggaatgagtgaacatcgttagagggagctcccacagctatgcgtgtgaccgtgtggctcgccgctgaaaaatgctgctcacatagcagaacttcgatgcaatcctttttggatttctaaggggaaattttaagaccgataggaggaataggctggggttgaataagtttggttcttatttttaaattagctcatctttagaaaacaactgaatttagaagattcttctgtaaggccccaaaggatttctttctgcctccccgctcttggctcttatttgtgtctctcctcgtgttctgagcttttcagcagcccttgtgggtcatcagccgaggaccatcagctcggggcccagagctggggactgggagttatgagctggactcttgaaggggccaatactaaaccgagccgttgccatttcctaggagccttgacaggctcaaacatctctgggtacccggggatttgactgtcattgttctgatcctttcccaaagttgtaaccctctgttgacatagcggaattgaagattgatttttcttcaccaccttctgcctaaagttcttagttctgaatgtgtccacacctcattgacttctatgagatgcccctgtcacgttcctcgattccttctagtccttaatagagtctttccttttcttgaaagaaatttgcccagttgacatttattttcatcgtctgctgaagtgacagatccaaggccctaagcttcagcagagttgcaggaagggaccatttacacagcctcttagatgtttaaggtttacccgccctgacagtggctcagcaggcgtaggcctcctggtgaaaagccgagcacatggctaacctgctctggtggaggggctttggaccgttcttgtgtactgcgaggcttgccttcctgctggtgtgtgagcagctctcgggggaacttgcttcctggctgagcaacctgtaaacagtatgtctgaggtgggactcccgggcccaaagcagccaaaggttgcacaagtctaagctccgttaggcctgtcagtgtggctgtcaaaagaaacgctgtttcttttctttctttcctttttttttttttttttttttttttttttgagacaggctgtcacccaggctggagtacagtggcacaatctcggctcattgcaacctgcgcctcccgggttcgagcgattctcctgcatcagcctctcaagtagctgagactacaggtgcccaccagcatgcccggctaatttttgtatttttagtagagatggggtttcaccatgttggccaggctggtttcgaacgcctgacctcgtgatctgccctccttggcctcccaaagtgctgggattacaggcgtgagccactgctcctggcaaaatgctgtttctaagcgtttctttgacaagtcccatccttcaggttcatgcatgattagggagaggcagcagccctgactgagcacctgagtgttcatggaaccaggtgcatagcgtaatgacatgccattcatgacactactttcttccctgaacatgccatgaattcctgatgattacacagttccccaacaagtgctgctcaaaacctggaactaatcagaaggaagcaccagccttgactgttagtgggacacggggaagatggctgtgaaccgaatatgcggtgcctttgggggagaatggttttagtatttagtaagtgtcagtatgtaagttttatgttgaaaaatgaactaagtcacaacaaggtctataaatttaattattgaaaaggataaagttgggccattcagtgaaacctcctgtaactgaagtctctaacacagtagccaatgggggaatcaaatgagcccaagaagaaattctgcgtaaactaggacttaggggagcccttagcattccactttggagtgaaggaacccgatccgccagttggggaacgctcctttgaggcccatgtgcttcctgctccgacgggagagagggataatgagacttgctcccaggtgccctgccctggagcccagcaggccacacgggctctttgactctgtactgtgccagtgatttccaagatgggagtggtgctctgattgcaggaatgtcttcttggaatggcttttctcacttctctagagtccttggtagggagcacatcatcagctgagctaacgtgagaacaggggttggagcacttgccaccggcagtgaagtaatcggacagctgacagtcttttccagagggtcggggattgggagctgaccccaggtcccgctccgttttctttgtgtgcagcacttgtgttggtgaccagcagtgaagagagtgcgtggacgtcaccgtgtggttatgaagctaacggcagccctcagcggtgccgacttccgctccccgacacattcctgtgtgcacgttcgtgggtctgagcgtgactcatggtgtgtgtccctagagcagttcactcagaggcttctcttccgtgctctcaagaataaaagcagggccgccacatcctgataagtcttgccattcagcggtcctgtcttgcagagggataagccagtgtccccaggccacagtccttacaccttgagcaagttccccagagtgaagcaatctttctagacaagttttgcgtttctcagaattttattttagtgatattgttaccaaaagattgtaaccccaaaatgtgtgcctttggcttgcctgttttaggaattcacttgtgttatctccccaagcaaaacaaaagaaagagaaaccttcctgttgacgaatcctttttaccttcttgagagttgtcaatgggactaacttgtatatttctttgctaccttcttttaaaaacatttttcttatttactattacagacgtatagtaatggtgcctgacataacccacagccaaaggccttggccttgctgtgtgtatttcaggctttttcttcccttttctttttttttaagtaataagatattacagttatagctgaagcctgatcctgttcccttttctccctctcgtcccaagcatcaccactgtcccaaatctgctccttcttcccacatctttgcagtttgggcaagtcttctgaatgcctagtcatgattttaagtcttctttccaccttcagtgatggttggctaccctgagcaagccagtagattcagttatgtgcctggagtccagatgttttatgtggatttttcatgtggaattgtttttggtaaggaagtattcccttgccacaccaatgaaaagagaagaaaacaggtagctggcacccactgcattgttgctttctgccagcctgctccttctccttcctctccagctctgttgtgtccagatgcaaactctacatgcagggtttgaccctaggtcctcacctgctgtagctctcacacggggaccgaatgctcttgtgtcgtaaatccttccttttgcttcctcgtgttggatgtgtttagtggttttcatcttctggtcactatttcattctaggtttatcccctttaaattataaattaaatgaattcttcgcttttcctaccagcaactacccaccaagttctaccatgtgttaatttaatcaacagttatttattgagtacttattacatgttgatttcctgttctcaacattggaatgaagacagcttagggttctgctttcatgaagcttgcatgctcttaggtggagacagacagtaattaagcagataaacaggaaattatgagctagtagtgggtccattgctgagaagtaagacaggtggtaggatgacccgtgccgtgtgatgactttagattgggtggttggggaagacttcacggaccttaaaactggccttggaacgggaagcgagaactgggcacggaagatgagggagtgggagatttcaggcagagggagcagcagcaggtacagaggccctgaggccttttattgtgtctttttgcttgagcgagtaacttagagcacacgtagagaaagacagcagaagtgatcttctaaacactctgtcctgtgtggagagctccttatgtgagattttgctgtgtagtgaattaaggctcagccaaactggctcacgtgagctctttgagcttgcctgtctctgtgggctgaaggctgttccctgtttccttcagctctacgtctcctccgagagccgcttcaacaccctggccgagttggttcatcatcattcaacggtggccgacgggctcatcaccacgctccattatccagccccaaagcgcaacaagcccactgtctatggtgtgtcccccaactacgacaagtgggagatggaacgcacggacatcaccatgaagcacaagctgggcgggggccagtacggggaggtgtacgagggcgtgtggaagaaatacagcctgacggtggccgtgaagaccttgaaggtaggctgggactgccgggggtgcccagggtacgtggggcaaggcgtctgctggcattaggcgatgcatctgcctggaagtctacctcctgcctgctgtccgagggcttcattggcgccacggaattgacttttccgtcttatatcattcctgtgtctttgtaggagtggaatcattctcatagtccgagtgtgtttccacatatggtgagagctgacaagcatggaggggttttggtgtaaaaagattagtcatttggagaggttttctcattttatggcaaggttcttttaaagccgtggatttccatgctgttcgtgcggcatggagatcacttcctaccgagagttaaggaggaaaaaaagatctctgagttttgaaagaagatttaaccaaaatgcatttgactcttctgtggatttttgttggctgatttggaaggcaggtgccctgggcatccccagtgggttccaattctgcagctgcccagactcctgcaggcagaggtggaagtgtccccgctagaaaggcatccaggaaactcgcttttgaccaactcagatacagtctggtctttcttgttaactgggactttaccctctccactaatgaatagtgtttgtagtttccaggcaggtttttttcttcttttgaagttctttgaaacccttaggacgccaagggaaggaagttttcattttcagccctttgcattcttcaaaatgtgatccaggcttttccctgtggcgagggtgtcccctagtgttgacttacattatttccacttgttttaaatgaactttgattaccttgacctgtgcacagaaatcaagagaggcagcccctttttagagctgttagaaaagaactgaaacatccacctctgggaaaaatagagtttagtttgtgcatgtgtctcagaagtcaggtgcacacattgagactggtgcagccacatgcctgccttttagggactccttgactgacctgatgccttcacccaaaggcatagtgaaatgggaagtatgatttctgactggtatgaagtggctgctttagagaaaagatcacattctttagtcctagaaaccaaaggtggcttcctgatgctcttattcagcacgtgcctgtctttgaggcaggactggcactggggtgggggcatggtttggggttaccttaaggaccctggatatttctcagataggactttttcttttctttttttgagacggagtcttactctgttgcctaggctggagtgcagtggcatgatctcagctcactgcaacctccgcctccccaaattggcgattctccttcctcagcctcacgagtagctgggattacaggcacccgccaccacacccagctaatttttgtatttttagtagagatggggtttcgctgtgttggcctggctggtctcaaactcctgacctcaagtgatctgcctacctcagcctcccagagtgctgggattataggcatgagccaccacacccggccctggactttttcttaattgaataaatatttatcaagttcttcacttctatttgacggttcctgggctcaacactggattagaaaatgaatgggacagagttcttcatctgagacatagggtggtccaggtagtaggaggaagaaggattgcagcgcagcagtcctcgggacaccaccagggggtgaacgaaggagggacgggggagctgtgcaggtgccccagctccttgggttgcacagggttgaagaccagacccaagaaatggggccttgaccagctcagcaaactgagaatggcctagatttcagcacactttcaccaggatttgtcaaatgaaggaagattccaagcgcaaaataccctagatttcaaccagtaaaagcttgtctgaaaacttccaagatcgggttgtacaacttgacatttgaggaaacgctacttcagtagatggtgctgtggcattgttttctgaacaactgaaggaggagactccagagaagggtacctgctggagacctgtgtggtttgtggggtgggtttcttatatcactgaatctaaagtgggtgcctttcagaatgtgctttactaataatgtgttactctgcttttaattatacttctaataattttccccaagagcctaattaacttacgatctcacagttggtaaagaattacaggatgtcattgcgtggatttctgtgggcagtcacccggagtggtatctaattagggaaaaggcagtatgtccctttctggaagtgtgttaactgaaaatacggtactaagcaactgctaaataaattagccctccttcctcctggccgtgcgcagaaacatccctgcagtatgttgcctatttgtcaaataagattagtgtaaatatggggcatttacctttgctatagaagctgaaattgccaggcacggtggcttacgcctgtaatcccagcactttggaaggccaaggctggtggattgcttgagcccaggagttaaagaccagcctgggcaacatggcaaaactctgcctctacaaaaaataccaaaaatcagccaggcgtggtggtgcgtgtgtattcctagctacttgggaggctgacatgggaggattacctgagcccgggaggttgaggctgcagtgagccgtaatcgtgccactgcactcctacctggggagcagagtgagaccctgtctccaaaaaaaaaaaaaaaaaaaaaagctgaaatccttgagtggattctaaatcatggcagtggctaacattcagcttcatcgtgcccttgctgtgtgcctggcagagacctctgtgcttactacatgtcgcatctcattgaatcctcacaaccttaagatccttccaggttgagcatcccggaccctaaaatcccaaatcctaaatgctcccaaatccaaaactttttgagcaccggcatgcagctcagaggaaatgcatactggaacatttcagattttggattttctaatttggagtgctcatctggtaatatagtgtggatattccccaatctgcaaagatctgagctccgaaacacttgtagccccaagcctttcagttaagggacattcaccctgtatcaacattttaatgctgagaaaatggaagagagagaggttaagtgactgacctggcatcacacagccaggagtggcagcatcaggatttgaactggggcactcagctccaaagctcagctcttcttttttaaaattgaacccagattcttatttctcaaataccataaaatatttacataagccacagttatgccttttaaaaaaaaatcaccttttccccccactctcccatttacttcctttgcagtttgtggctacgatctaccttcctcttcaaaacccttgaaaaatccttgcagccttgcccaagcgtccttccctcagccgatttttgggcctcagtttcctcccatccagcctgtttcctatcgctggcttctccaagggcagagccagagtcctcttttgccagcagggggagcaagggcctacttttaaccgcaactccatagtgaacaagtcaagcaaccttgggtcattcatataccttccaggcagaaggaagacagaagagaacaggaaaaaagcaggacactaggctgacccctgcagatgggaagctggaattacagcaaaggctcattgattgggaactgcacccttgaattttgatagtattgggcaggacatagtcttgctatctgtgttaaagggaggacgtgcttaagaaaaccaacagtcaagtacaagaagctctaattttttttgaggtgggggaacggggtctcactgtgttgcccagctggcctcaaactcctggctcaagcagtcctcccacctcagcctcctgagtagcagggatcacaggcttgtgccactgtgcccagctaagaggctgcaattttttaatgaactgtattcagagtttgtacatcagtgtcttttttttctatgaatcagttctctaagtaatagaatttggaaaagaccgctggtgatctagctgtggcatttagattgactcatgagctaactgacaaatttactacttaaacagtggaaaataatgtgcaggatatatttttttgaataggttgtcccaccctcgagttctgtgtctttcctgagtccgcatatgtgaaccttgttttaaccaggtgacagcatcccataggcacggatctctgtcttctgttgtccacatcatgtgtcttggcagttgttccttattgatatacataaggttgtcttgtttttgtatggatatattttaacatgtaccagtgttcagtgggcctttctcttatttccaatattttgctgttctaaacagcagcacagtgattcccctcatttgcatgtatgtgaaactatcctggtgggtccgcttccagaaactactggatcagggaccatgtgcatttatggccttgaccatactgccagagtaccttccaaggagtttgtgtcatcaatttgcactccccagtggtgttgagagagtgcctgtttcctccacccagcacagtgtgtttcggttttatttctcccaggaaatgggtgttagttggggagctccagaaagaagccgagaagaagggcagtcgtacccttggcagttgtacgcagtggctctctggccgcacaaggagggctcggagcctgctgttgccaggttgcacttgctcttgcaagacaggcattccttgcagtgggttctcctctggccagggagatgagttctgggggctcctctacgaggtggtctctcctgggctttcctctcgagcttcaagtcccacctctggagtgtgaatcgccttcctcagtctaactctatccctccagtggtttttttttttttgctttttgtttttgtttttgtttttttgagacagagtctcactctgtcacccaggctggagtacagtggcgtgatctcggctcaccgcaagctccacctcccgggttcaagcaattctcctgcctcagcctcccgagtagctgggactacaggtgcctgcgaccacgccggctaattttttgtatttttagtagagacagggtttcaccatgttagccaggatggtctcgatctcctgacttcatgatctgccctcctcggcctcccaaagtgctgggattacaggcgtgagccaccacacccagcagtctcttcagtgtatttagctgtgttgatcctgattcatctgatgggtgaaggaatattggaaataaggataatccctgtggtgtttcactgtgcctgtaacctctctcacctagcatttggttaaccagaaacagatgtggaaactgatctatctgtagataatggccctgctcagggagggggtccctgctgagagcgagacattgaaagcctgctacacagaaactgctggaaggccaagccatttcttttttctttttctttttttttttttttttttttcagacagagttttgcccagtagttcaggctggagtgcagtggcatgatctcagttcactgcaacggcctcccaggttcaagcaattcttctgcctcagcctcctgagtagctggcattacagactcctgccaccacgcccggctaatttttgcatttttagtagagacacggtttcaccatgtggccaggctggtctcgaactcctggcctcaagttatctgcctgtctcggccccccagagaggccaagccatttttaaaaacagtgttctttttcatgctgtagaatacctgtgcttgggggtgagcaaaaaggaggaaactgattagaaaatacctatgagggccgggtgcagtggttcatgcctgtaatcccagcactctgggaggccgaggagggcagatcacaaggtcaggagatcaagaccatcctggttgacatggtgaaaccccgtctctactaataatacagaaaattagctgggcgtggtggcaggtgcctgtagtcccagctactcgggaggctgaggcaggagaatggtgtgaacctgggaggcggagcttgcagtgagccgagatcgcgccactgcactctagcctgggcgacagagcaagactccgtctcaaaaaaaaaaagaaaatacctgtgagatgttgagtctgggagaatgtatctgtgagaagacaaacaaccctagtattcattaaagaaccagcctttgttttctacaagctatctgttcggtctactcaggaatagagataaactgccttaatagtaataaaagcaagcaccgctgagtgagtgctggcctcatgccaggaactgctcttggcactctgtgcacaagggagatactgacattctttctgttgtgcagatgagaaaacaggctcagagaaggtgagtaacttaccatggtcacacagcagcagagctaggtcagtataatccacaagtcattctcttaaccgctccgccgtaccgcccagaatgttcatctgcatctgggccagcctcgtcagtccgtgcaaagaggccagttgacccatctccctccctaacaagcacagaagagaccaggctgaaaattcatagctttcactcaaagtgtttccttcacctcattcatctgagttagctttattttactatataaagagaattttcttcagcaaaatgataggaatttttttaatgaaagtaaaggaatgtcacagaattgcgtcagggatatttccagtttaacacaactacaaacgtaggctgttttgttgttgttgttttggttttctattttgagatgaagtctcactctgtcgcccaggctgaagtgcagtggtgcgatcttggctcactgcaacctcctgctcccgaattcaagtgattctcctgcctcagcctcctgagtagctggaactacaggcatgcgctaccacgcctggctaatttttgtatttttagtagagatggggtttcaccatgttgaccaggttgttccggaactcaggtgatccaccttggcctcccaaagtgttgggattacaggcatgagccaccacactcggccagctgttgttaatagttaaaattataaattggacaaggtctgattccagcagggggagacaaattcacattgatttttctataagaaaaggaattatttgtactttcctcccttgtgtgtttgtgtgtatgtaagagagacagatgagaagagggctgcctttgagagccatgttccttttgcatgtacatacctctcaagattattacatgggtcttttagaagagggtcagtagctataaaagcaaatgatatttatgaaatgatttcattgtatgtggtttattatgtagtcttcaaaacagaaaaaccccacttgcttcgaaagcttcctttgagagctactttttaaccatattgttgatcaagcaagattcttaaagccccagtcctatacgtgagcagcattgaatccccggatactggcaggcgttcactgtccagcctttgacattagcatgtcaccctggtaaatcagagcactccatgccaaaaaacagcatggtctgctgagcacattaaggagcagagagggctcagaagaattaaacggccaatggggtggtgacagaggtgagctctttccccctcggacagcttggcatggtgactaccaatgaggtttaattgacattaagagcagctcaccatttttaaagagcgataaattgtttccaagtttcagcctcacggagccctgagctaagagataatgggctgacacatagcctcattggtcacgcttcacttgtaaacaggattggccaaagcaagaaggctgtaagtaaaggttggcccgtcctctggaagcctcccccacagcagggtggggaactggggcagccatagcaagcaggaccatcaggacacggtgtctcccaaacgggccggaacatacaaggttctacgtttaatagaaagttgatcaagccttcctctttggggagcctaatttttaagccattcactctctgttcccctgcagtcttttctctccaaactctgttgaaacttggaggcatctcgcttcctcctttggcctttgtagccaggttttcgcagcaaacagaccatatcatttaacacccacctgcttcttgttctgatagtcagttcagtagacagtagcattttttaagtcaaaaagaggcttagtgatgtaggccaaggtcaaggctctgtgtcatggggctctccccagggctcagtgccacggcacttcagacttgaccccagactgaaaagatgagaggacctgtagaagtcacggcctgtctgtcccgggcccatgctcctatctttttctcccccttggcatttagataccatggacttgttaaaatgtgacatgtactgatgatccttatgaatttgttggtaggggagctgctggtgaggattattttagactgtgagtaattgacctgacagacagtgatgactgcttcattaagagcccacgaccacgtgccagaatagttcagcatcctctgttgctactgtactttgagacatcgttcttctttgtgatgcaatacctctttcttgtcatgagggtctcttcccttaaatcaggtacatttcagattcttcaggtgatgttttttaggctgagtgtgttagcaccccttggaaaccaggttccctggggaaagtgtgtcacgtttgtggtgtttgcccgtatagctctcccacacccccacgagctccaagaggtggggaagcacatgtggcctgcctagcaggcaccagaagcaggttgtcggcacatgcaagccagctttgccctgttgcctgggggagaattgaaaagtttggccccaaaggggaaaattctttctgccatcaagttgctggtcagctgtcatggaacctgtctgcagcaatgtggctgtcacaaaacgcagcccaggacgagtatgcgctgaagctccattttgcattaactagtcaagtacttacccactgaaaagcacttcctgaaataatttcaccttcgtttttttccttctgcaggaggacaccatggaggtggaagagttcttgaaagaagctgcagtcatgaaagagatcaaacaccctaacctggtgcagctccttggtgagtaagcccggggctctgaagagagggtctcgcgccgcacccccagggtgacacaggcgctggggaagacgcacgggcggctcactgcacaaaacctcgttggaatatttgtgctctgccgacgttcagccgcgggtaaaatgaggcctgtatgggatgggtgtgtgcgtgtgtgcacatatgcacatgtatgtatgagagggagaatgtgattattttaagtggatacctaaaagcagtcaaatgcaaatctgaaattagtttctgaaacttgggcattttccagagttttctcactgaagtgattctgtaagtagacacataaccatcagacctaaccattcaggggtaaactgacggtggtgaaggtcatttgaggtggggccaggtctgcgtctgaattctgtggcagcctctccctgcgtaaattcaagttcactggcttgagaagaagaaaagagcctggccatgtccctcccacacgagcacagtctcaggatgcaggtgcttgggaccatgttggaagttgggcccaggactgaggagcagagtcagaatccttcagaaggctttttctttagacagttgtttgttcagttgggagcggagccacgtgttgaagtcctcgttgtcttgttggcaggggtctgcacccgggagcccccgttctatatcatcactgagttcatgacctacgggaacctcctggactacctgagggagtgcaaccggcaggaggtgaacgccgtggtgctgctgtacatggccactcagatctcgtcagccatggagtacctggagaagaaaaacttcatccacaggtaggggcctggccaggcagcctgcgccatggagtcacagggcgtggagccgggcagccttttacaaaaagccccagcctaggaggtctcagggcgcagcttctaacctcagtgctggcaacacattggaccttggaacaaaggcaaacactaggctcctggcaaagccagctttgggcatgcatccagggctaaattcagccaggcctagactctggaccagtggagcagctaatccccggagtaaggaatatttcatttttgaaccattttgggctaagtggaatattaaatgaagttcataaaaggcgtccttcctaataatcacagtcccctctgaaagagagtactcattgttcctccggggccagcgcccagcagtaatggcctcttcctgggagccgctggcattgcttttacgcaaactcatgggaacaaccagtacatggcttttgttttttagtgtgtgtgtctttttttcctgctttctctttattatcttttcattctccacttaacttgctgtcctctgattcagggatgtttccacaattgtcagaattgtgtatgtggaggtctaaattaagtgtctttgctgttttaaaccctgaagtgttttgaccttcaaatgtgccacaattatcttggtcttcaaattctttgctggtggaaatggcttcccagcaaagcgacggcctgtgcaggacagagcctgatgggctttgctggcgtcttttatacgagatgttctccacaccaccactgtgacctttcctacccaattagctcaagtatgaaacctctacatgagatttcatagcaaggaataagggtagcatgtgtgaaatgctggcggctccttgtaagacagattttctatgctccatgagagcctgatccagatactcctggctttcaggaaagtgaatcctctgatgctgcaaattgagattgcttgacttctggtttgcctggcacggccgggtccgttccttcttcattcaagcgaacttaaaatgctttatcaaaatcctcttaggcacaactcttctgtatttaatttcactcttgttgctgacgatcaggctatctcacgcagccatcacctcaagctgctgccccctctcattccgctcttcccgtttgccttgtgatttcatggttaatgttcatgaaccaaagattagactcctacctccctgggagaatcaggaagtgagaggaagcagattatacaggagagagttttttaggatacatttgggtacacctcaggaagaaagagggaagtaggaaacacagtttgggtaaagaatgccatgggctttgttttattttgtcccatcaagtctgaataggacaagtggagatgcactctgatagaagtttcttgcaatcaaggactgggctcagtgtttgtctccgtgcctggcatagagtagcaataactgcacttactattctcgacacttcaatcaaagcacttagcatattaattaattacactcacagcaaccctaagaggtaggtgccattattatcgtcttcattttacggatgaggtaactgagtcccagggtaattaacttgctccaggtcatgaggccagggagcccgctcccagcaccagcctctccccatgttgggatctcagggtgtgtttgctgagaggctggcactgtgttaattgccgtgggcattaatacaaacttccagggcattggactcaatctttccattgtcagcattgcacctttgctcagcagtggtggatttgtgaagtggaaggttggccaggagctctcatgggtgaacattttcctttcttagagatcttgctgcccgaaactgcctggtaggggagaaccacttggtgaaggtagctgattttggcctgagcaggttgatgacaggggacacctacacagcccatgctggagccaagttccccatcaaatggactgcacccgagagcctggcctacaacaagttctccatcaagtccgacgtctggggtaagggctgctgctgcactgaagtggtccttcctgactacaggagggtttttttctgcctctttcttgctcttccctttcttttcttcctttctttttgtttttttgagacggagtctcactctgtcacccaggctggagtgcagtggtgcaatcttggctcattgcagcctctccctcccgggttcaagcgattctcctgtctcagcatcttgagtagctgggattataggcacccgccaccacacccagctaatttttggtatttttagtagagatggggtttcaccatgttggccaggctggtctagaactcctgacctcaggtgatctgcctgccttggcctcccaaagtgctgggattacaggtgtgagccactgtgcacagccacccttttttttttttttttaactgtgtatttggcctgaggtccaaatatggtgcacagtgtatctgctgatctgttaagtctcctctataagccccctctccatgtctttatttcccttgctgtttattgaagaaaccatccttagagtttcgtacgttctgggttttgctcattgtctcccatggtgtgatttaatatgttcctctgacttcagtattcctagtaatgggtggctggatctggaacggcctcatcacattcaggtttgactgtttctcttttagtaagagtggatcaggggagatggtgtgcccttccatcagtagatacaaaatgcttcatttatttccttccttcctttcctcccctctccctcccctcctctcttctccttctccttccgacggagtttcgctcttgttgcccaggctggagtgcagtggcacgatcttggctcactgcaacctctgccttctggtttcaagcgattctcctgcctcagcctcctgagtagctgggattataggcgcatgccaccacccccggctaatttttgtatttttagtagagacggggttttaccatgttggccaggatggtctccaactcctgacttcgtgatccacccacctcggcctcccaaagtgctgggattacaggcgtgagccaccacgcctggccccaaaatgcttgatttgctatcgtttttttgtgggggtttttttttgagtaatttttggcagttactgatatacagtgcctagatccaatagtttgctaggtattgccaggtaggaattctctaattctgtcattcctgttaagttactagtggaaacttgtatgaggagaaacagttcctcatctgtgtggttactcagtggtacagttcatgtaggaagagcagggtcaattcttgcttctttgtttttatttaccagtttttaaaataacaaattactttttcttttttttttttggagccagagtcttgctttttctggggtacaaagtacaggctggagttcagtagcatgatctcggctcactgcaacctccgcctaccagattcaagcaattcttctgcctcagcctcccaagtagctgggattacaggtgcctgccaccacgcctggctaaatttttttgtatttttagtaaagatggggtttcaccatgttgcccaggctggccttgaacttctgagctcaggcagtccacctgccttggcctcccaaagtgctgggattacaggcgtgagccaccatgccctgccacaagttggtttcttttttttttttttttttttttttttttgagacagtctcactctgtcgcccaggctggagtgcagtggcgcgatcttgatcttggctcactgcaagctccacctcctgggttcacaccattctcctgcctcagcctcccgagtagctgggactataggcatctaccaccacgcccggctaatttttttgtatttttagtagagacagggtttcaccatgttagccaggatggtctcaatctcctgacctcgtgatccgcccgcctcggcctcccaaagtgctgggattacaggtgtgagccaccgtgcccggcccctaatttttgtatttttagtagagatggggtttcgccatgttggccagggtggtcttgaattcctgacctcaaataatcctcccacttcagcctcccaaagtgctgggattacaggcgtgagccaccgcacccagccttgtcctggtcttctgatgataaagagcctggtaaaatgtcagagcctgggctgctgctggggccatcccttctgaggtctgctgcaaaggtaactgattttaaatgtagtgtagtgaaatgctacacatcttgaacagcctttctctttcggttttctttcagcatttggagtattgctttgggaaattgctacctatggcatgtccccttacccgggaattgacctgtcccaggtgtatgagctgctagagaaggactaccgcatggagcgcccagaaggctgcccagagaaggtctatgaactcatgcgagcatgtaagccttcctcagcctgttctcacgagtatatgtgggcattccaggaaattcaactgtgcaggagtgtgtacacaaagttgaaagtttttccatgagctctctccattccagttcttcagatgcagctaatgtagccatttgatacctattgacctttatttacagataaatagtatgtgcgtgacttgtcttttaaagcaaaaatggtattgatagataccaaacctgggtgtattcctaaatacagattcctgggccctgctttcacagacattctgctatagtagctaagctcatgaggtgattttttttttttttttttttgagacggagtttcgctcttgtcgcccaggctggagtacaatggcgcaatgttggctcacttcaacctccacctccctggttcaagcgattctcctgcctcagcctcccaagtagctgggattacaggcatgcaccaccacgcccggctaattttgtatttttagtagagatggggtttctccatgttagtcaggctggtctccaactcccaacctcaggtgatctgcctgcctcggcctcccaaagtgctgcgattacaggcgtgagccaccacgcccagctgcgaggtgatttttatctggtcgttttatactgattacatatgtgttatctgtactatgcacacacaggatgttttcatatatcttataaggtatttatatggccatttcttacactgttttcccacacatgtctttccacgtccatatattcagatctctccctctccctacctcttatttatgtatagctgcccagtactccatttcactcattcatccggtcctcttttgatgtgcatttggttgttttacacatttgtttggtttttgcccttataaacaaagcagaaacaaatattcatgtacacgaatctctgggcactttggctggtatttctaaaagttgaactgttggttccaagaactgtgtgggttttaaattttgatacattttaccaaactgttaaaaaaggttgtgccattgtatgctccagtcagacgcatatgggagtgactgttcctggtccccagtactaggctttgtcagtctgtttagtcctcatgttagtctcattttcatgagaatttctttacttcagactttgataaccgtgaagaaagaacaagatagaaggtgagctgtttggcttagtaattttctacacctactagagcgggactgggaaaaatatatttgtaaatgcagttcttgctgtcactgtctctctggggttttacaatccatattcctgccagcatctaacgtcttttcaaattcttaatgtctataacaggacatgatgacattcatcgttttgacttgttgcagcaaaagatggttagcaggattggaatgttgctttcattctagacttttccttgagaactgctagccccgtattgctagccagatctcatggatgatctgacttgggtttcatctgtccaggttggcagtggaatccctctgaccggccctcctttgctgaaatccaccaagcctttgaaacaatgttccaggaatccagtatctcagacggtaaagtacccatcccggggtacctgcagtggggtgaaagggcagccatgtgggactgcagcctgggtcattcggttcacttcctggtgaaagttcacagaccagcctgtcctgagaccagaaagctgggcagaggtgtggagtattgtgctttcttgtctgctgcagccctgcagagttctaagaaatgctaagggctgtttctccggtatccacgtgccttttctttagttgtatgcagatgagcactgttaccttacaaagaaagagaaccaccacaccaagccaacaccagtactgatggctgctggatttttgtttctgtccctgtatgattcttagaagtggaaaaggagctggggaaacaaggcgtccgtggggctgtgagtaccttgctgcaggccccagagctgcccaccaagacgaggacctccaggagagctgcagagcacagagacaccactgacgtgcctgagatgcctcactccaagggccagggagagagcggtaagtcccccgcttcccccaaccccactgctcttcccttccctgccagaggctacattcaggccatcataggccaacgggaagctgtgaatggagcccgcacagaagggcagccatggcctttgtcaatggttcagcttcggaaggaggaaggttctcctctccccacctgcctcctatcccctccctctgagagtccccgaggagcataggctccagcagtgagttcagtcctgtaggcagaggtgcttctgaagcccgccaaggagctagcccatctcccacctattacccgcggcatctgtggttgctgtctcagagcagattcaacaatagtaagcaccaggctgcgtgacaagcagctcacggtgaaggcactgatgtgagaagctcgctgcagccaggtggaaccaggacacgcacatggacagaacccgtgtcctggtggtctctgggaagagcatctttctggtgccattgcctaggcgagcaagggagttgggatcagctcaggagggggtctcaagacactagcaaaaataataatggccaacatttatgtagtgtgcctactacaggccaggctctgttctatgttcatggttgacccccagaaccagcagtccaggttctgctgcagaccagctgaacaaaagcattgaggggtgtattagtctgttttcatgctgctaataaaggtatacccaagactgggtaatttataaaggaaagaggtttcaccgactcacagttccacatggctggggaggcctcacaatcatggctgaaggtgaatgaggagcaaggtcacatcttacttggcggcaggcaagagagcttgtgcaggggaagtccgctttataaaaccatcagatctcgtgagacttattcactaccacgagaatgtgggagaaacctccccatgattcattgatctccacctgaccccaccgttgacacgtggggcttattacaattcaaggtgagatttgggtggggactcagccaacccatattggaggtgggggataggccaagcatctgggttcatagaggatcctggggatggcaatggtggactccattctaatggactgcagactgggtacatgtgaagggactggacaaagccctacttcttgaagatttatggtgggatgtttactgacagcagaatctataaacctgagttttctttatcacgtactctcattagtaaaaaaaaaaaaaaaaaacagaacatgcagcccatatatatggtatataaagtacgtatgtccactactgtaggagtagagtgcgtatgttatgtaccaaaacgcacatttaaaaggcttgcatgctaaataagtccaaatttgcaatacttcccgccccgctgggccatctcactcacctacttggaggttatggcgtatagactctccagaatcttccacccttcctcctcttatcggttttcctgatttcaggtggctgagcagtagggaggagaggcctctgggaacgctgtgcttattaagaacccagtgatcagcagtcatgttcatttacgcccgtcagtttcatctgaggggtattttgatagtgatctcttggtgagccgagggtgtcaattaactgctcagtgctgaaactgagtggtgcataattcattgcaatttcactctcctggcctccttccactagattaaagttttgggagggctttggtgttccctgattcagatgtcccgcgtgctgccttgggttctgataaatgcatactggtacctctgttgagttacaggtgccaacagaaaacctcttcttgcaagctgacctctgagggagaattctgttactcactagcaggagcttggcaacaccaaaaagatttccttttttttttgagatggagtctcactctgttgccaggctggagtgcaatggcatgataccagctcactgcaacctccacctcctgggttcaagcgattctcctgcctcatcctcctgagtagctgggactacaggcgtgtgccaccacacccagctaatttttgcattttttagtagagacggggtttcaccatgttggccaggatggtctctatctcttgacctcatgatccgcccacctcagcctcccaaagtgctgggatgacaggcttgagccaccgcgcctggctaccagaaagatttcttatgagctatgattcatatttaaagagtgcccattaaaaaactgttggccgggcgtggtggctcacacctgtaatcccagcactttaggaggccgaggtcagcgaatcacaaggtcaggctcccgtggcacaagctgggggctgcccccaccccatgctccccagaggagcacccaagcgtctgggctcagacaggcctggatctgataaccggctctgatgccaccatccctgaggccaggcaagtcccagccgggctacagcactgttgtgagaatgcagatgaggttgtaaaggtgaagcacgtgtcacgcttctctcaataaagccatcattgctgttaggattgtcattaggaaaggctttgggccgggtgcagtggctcatgcctgtaatcccagcactttgggaggccaaggcgggtggatcacctgaggtcaggagtttgagaccagcctaaccaacatggtgaaaccccgtctctactaaaaatacaaaattagccaggcgtggtagcgggtgcctatagtcctagctacttgggaggctgaggcaagagaaccatttgaacctgggaggcggaggttgcagtgagctgagatcgtgccactgcactccagcgtaggcaacaagcgagactccaactcaaaaaaaaaaaaaaaccacacacacgctttggtctctttccctgaagatgggaacaaaaagctggacggccctggcctcttcatccctgcactggtttacttgaaggcagcagccccccacccacccacatcactctctagtgagtataaaaacgatgacaaggccaagcaaagggtcaaaacctgtggctctcctgccagccagctagccgagaggcctatgaggagctctgggaataaggggctgtgtcccacagtggggaagggacaatgggccattatgcacaggagataagaagggatgacctttgacaatttttttgtttgtttgtttgtttgttttgagatggagtctcactctgtctcctgggctggagtgcagcagtggcactctgcctcccgggttcaagcgattctcctctgtcagcctctagagttgtctggagttgtcagctcttccccttgcgtttcagatcctctggaccatgagcctgccgtgtctccattgctccctcgaaaagagcgaggtcccccggagggcggcctgaatgaagatgagcgccttctccccaaagacaaaaagaccaacttgttcagcgccttgatcaagaagaagaagaagacagccccaacccctcccaaacgcagcagctccttccgggagatggacggccagccggagcgcagaggggccggcgaggaagagggccgagacatcagcaacggggcactggctttcacccccttggacacagctgacccagccaagtccccaaagcccagcaatggggctggggtccccaatggagccctccgggagtccgggggctcaggcttccggtctccccacctgtggaagaagtccagcacgctgaccagcagccgcctagccaccggcgaggaggagggcggtggcagctccagcaagcgcttcctgcgctcttgctccgcctcctgcgttccccatggggccaaggacacggagtggaggtcagtcacgctgcctcgggacttgcagtccacgggaagacagtttgactcgtccacatttggagggcacaaaagtgagaagccggctctgcctcggaagagggcaggggagaacaggtctgaccaggtgacccgaggcacagtaacgcctccccccaggctggtgaaaaagaatgaggaagctgctgatgaggtcttcaaagacatcatggagtccagcccgggctccagcccgcccaacctgactccaaaacccctccggcggcaggtcaccgtggcccctgcctcgggcctcccccacaaggaagaagctggaaagggcagtgccttagggacccctgctgcagctgagccagtgacccccaccagcaaagcaggctcaggtgcaccagggggcaccagcaagggccccgccgaggagtccagagtgaggaggcacaagcactcctctgagtcgccagggagggacaaggggaaattgtccaggctcaaacctgccccgccgcccccaccagcagcctctgcagggaaggctggaggaaagccctcgcagagcccgagccaggaggcggccggggaggcagtcctgggcgcaaagacaaaagccacgagtctggttgatgctgtgaacagtgacgctgccaagcccagccagccgggagagggcctcaaaaagcccgtgctcccggccactccaaagccacagtccgccaagccgtcggggacccccatcagcccagcccccgttccctccacgttgccatcagcatcctcggccctggcaggggaccagccgtcttccaccgccttcatccctctcatatcaacccgagtgtctcttcggaaaacccgccagcctccagagcggatcgccagcggcgccatcaccaagggcgtggtcctggacagcaccgaggcgctgtgcctcgccatctctaggaactccgagcagatggccagccacagcgcagtgctggaggccggcaaaaacctctacacgttctgcgtgagctatgtggattccatccagcaaatgaggaacaagtttgccttccgagaggccatcaacaaactggagaataatctccgggagcttcagatctgcccggcgacagcaggcagtggtccggcggccactcaggacttcagcaagctcctcagttcggtgaaggaaatcagtgacatagtgcagaggtagcagcagtcaggggtcaggtgtcaggcccgtcggagctgcctgcagcacatgcgggctcgcccatacccgtgacagtggctgacaagggactagtgagtcagcaccttggcccaggagctctgcgccaggcagagctgagggccctgtggagtccagctctactacctacgtttgcaccgcctgccctcccgcaccttcctcctccccgctccgtctctgtcctcgaattttatctgtggagttcctgctccgtggactgcagtcggcatgccaggacccgccagccccgctcccacctagtgccccagactgagctctccaggccaggtgggaacggctgatgtggactgtctttttcatttttttctctctggagcccctcctcccccggctgggcctccttcttccacttctccaagaatggaagcctgaactgaggccttgtgtgtcaggccctctgcctgcactccctggccttgcccgtcgtgtgctgaagacatgtttcaagaaccgcatttcgggaagggcatgcacgggcatgcacacggctggtcactctgccctctgctgctgcccggggtggggtgcactcgccatttcctcacgtgcaggacagctcttgatttgggtggaaaacagggtgctaaagccaaccagcctttgggtcctgggcaggtgggagctgaaaaggatcgaggcatggggcatgtcctttccatctgtccacatccccagagcccagctcttgctctcttgtgacgtgcactgtgaatcctggcaagaaagcttgagtctcaagggtggcaggtcactgtcactgccgacatccctcccccagcagaatggaggcaggggacaagggaggcagtggctagtggggtgaacagctggtgccaaatagccccagactgggcccaggcaggtctgcaagggcccagagtgaaccgtcctttcacacatctgggtgccctgaaagcccttcccctcccccactcctctaagacaaagtagattcttacaaggccctttcctttggaacaagacagccttcacttttctgagttcttgaagcatttcaaagccctgcctctgtgtagccgccctgagagagaatagagctgccactgggcacctgcgcacaggtgggaggaaagggcctggccagtcctggtcctggctgcactcttgaactgggcgaatgtcttatttaattaccgtgagtgacatagcctcatgttctgtgggggtcatcagggagggttaggaaaaccacaaacggagcccctgaaagcctcacgtatttcacagagcacgcctgccatcttctccccgaggctgccccaggccggagcccagatacgggggctgtgactctgggcagggacccggggtctcctggaccttgacagagcagctaactccgagagcagtgggcaggtggccgcccctgaggcttcacgccgggagaagccaccttcccaccccttcataccgcctcgtgccagcagcctcgcacaggccctagctttacgctcatcacctaaacttgtactttatttttctgatagaaatggtttcctctggatcgttttatgcggttcttacagcacatcacctctttgcccccgacggctgtgacgcagccggagggaggcactagtcaccgacagcggccttgaagacagagcaaagcgcccacccaggtcccccgactgcctgtctccatgaggtactggtcccttccttttgttaatgtgatgtgccactatattttacacgtatctcttggtatgcatcttttatagacgctcttttctaagtggcgtgtgcatagcgtcctgccctgccccctcgggggcctgtggtggctccccctctgcttctcggggtccagtgcattttgtttctgtatatgattctctgtggttttttttgaatccaaatctgtcctctgtagtattttttaaataaatcagtgtttacattagaattcttggcagattgcttcggcctgtgatcctgccctgttgttctgagcctgtgcggtggcggggccgggatgtagtgggttctggtttcccgacggggctggggcccggcatcaggtcttacagagcagaacggtggcaggttgcccccagctgcccagggcctctgcggcctgggtgcccacagccatctttcaggcacttgccctgctatgctcggaccctttctgtacccttggcgcttacctgctggcagcctggccccaccggcatcactgggagtgggctgtgccaccatacaagccacatctgactggcggtatcaggctgtcgcagcgacgtggaagtggggtgaggaggtcacgtcccgtgcttcttgctggctgagggcaaatccctccccacgtgcgcctgttctctctccacctttccgccctaagcccccaggtgcccttactcactcatgttccttgagccaggtgtcttaggtctttgtgtggatgaggaggagcggaggtgtgaggtgtgctgggccttcagggcctgggaaggccatcccagactgagccccaccgccctttcccagctcagtccccaccgagctgacagcttggaaaggggcggttgggaagtgagtagcaccctctgataatgatactgatcaggccagcaggtttgtcaggggtgcacatcctgctcagcagagcatatgaagatcacagcttggtgaagctccactcgagagacctggagcgagactgctgtgcggtgggtgacaggtggaactccagccgggccggggctggtggagcccactgcgagcagtgccaggcacaagattctccccctctcatttcacagggacaaaaccaggctggggcccccaatttccttgccggttgaaccatagctggccaccagatccaccaagcctggggcttctcttgtcctttgaatggctgcttctcccaggtctgaacgaagacataggacaactctggtgacagccacagctggtggccgcttcctcgtgtcagatgtggacggtcaccccgccctcccagcgctaagcgctgagactgcgtgtccagagtcggctcctgcacgtgaggccaattggtcacactgggccagtgtggaggaagatgcctctcatctcccaaatggggatctttcatgggtgtcacctgagcttatagagcttagtttagtctagccattccaagacagtggtttcttaaccttttctaggtcacaaaacctcctgagaacctaatgaaaactggatcccagccccagaaaaatgcacctgtgtgcacacacccagcagtttccaggtcatttcgagtcctgccttcgaggtccattgttattatttacaaaacaccagcctaaggtattggacattttcttaaaaggccaggcaaggtggctcatgcctgtaatcccaacactttgggaggctgaggtgggtggattgcttgaggccgggagttcaagaccagcctgggcaacatagaccccatctcacaaaaaatacaaaaacaagctgggtatggtggcacctgtagtccagctactcaggaagctgaggtgggaggattgcttgagcccaggaggtggaggttgcagcaagctatgatcgtgccactggattccagctccagagtgagaccctgtctcaaaaaaaatttttttttcttttttctttttgagacagagtttcgctcttgtctcccaggctggagtgcaatggcacaatctccgctcactgcaacctctgcctcctgggttcaagcgattctcctgcctcagcctcccgagtagctgggactagaggtgcgcaccaccagacccggctaatttttgtatttttagtagggacggagtttcaccatgttggtcaggatggtctcgatctcttgacctcatgatccgcccaccttggactcccaaagtgcttggattacaggcatgagccagcgcgcccggcccaccactttttttttttttttttttttttaagacgagtctcacactgtcgcccagtctgtagtgcagtggtgccatctcggctcactgcaagctccgcctcccaggttcata

SEQ ID NO: 37 - DNA, 4098 bp, Homo sapiens
ggtggcctctgtggccgtccaggctagcggcggcccgcaggcggcggggagaaagactctctcacctggtcttgcggctgtggccaccgccggccaggggtgtggagggcgtgctgccggagacgtccgccgggctctgcagttccgccgggggtcgggcagctatggagccgcggcccacggcgccctcctccggcgccccgggactggccggggtcggggagacgccgtcagccgctgcgctggccgcagccagggtggaactgcccggcacggctgtgccctcggtgccggaggatgctgcgcccgcgagccgggacggcggcggggtccgcgatgagggccccgcggcggccggggacgggctgggcagacccttggggcccaccccgagccagagccgtttccaggtggacctggtttccgagaacgccgggcgggccgctgctgcggcggcggcggcggcggcggcagcggcggcggctggtgctggggcgggggccaagcagacccccgcggacggggaagccagcggcgagagcgagccagctaaaggcagcgaggaagccaagggccgcttccgcgtgaacttcgtggacccagctgcctcctcgtcggctgaagacagcctgtcagatgctgccggggtcggagtcgacgggcccaacgtgagcttccagaacggcggggacacggtgctgagcgagggcagcagcctgcactccggcggcggcggcggcagtgggcaccaccagcactactattatgatacccacaccaacacctactacctgcgcaccttcggccacaacaccatggacgctgtgcccaggatcgatcactaccggcacacagccgcgcagctgggcgagaagctgctccggcctagcctggcggagctccacgacgagctggaaaaggaaccttttgaggatggctttgcaaatggggaagaaagtactccaaccagagatgctgtggtcacgtatactgcagaaagtaaaggagtcgtgaagtttggctggatcaagggtgtattagtacgttgtatgttaaacatttggggtgtgatgcttttcattagattgtcatggattgtgggtcaagctggaataggtctatcagtccttgtaataatgatggccactgttgtgacaactatcacaggattgtctacttcagcaatagcaactaatggatttgtaagaggaggaggagcatattatttaatatctagaagtctagggccagaatttggtggtgcaattggtctaatcttcgcctttgccaacgctgttgcagttgctatgtatgtggttggatttgcagaaaccgtggtggagttgcttaaggaacattccatacttatgatagatgaaatcaatgatatccgaattattggagccattacagtcgtgattcttttaggtatctcagtagctggaatggagtgggaagcaaaagctcagattgttcttttggtgatcctacttcttgctattggtgatttcgtcataggaacatttatcccactggagagcaagaagccaaaagggttttttggttataaatctgaaatatttaatgagaactttgggcccgattttcgagaggaagagactttcttttctgtatttgccatcttttttcctgctgcaactggtattctggctggagcaaatatctcaggtgatcttgcagatcctcagtcagccatacccaaaggaacactcctagccattttaattactacattggtttacgtaggaattgcagtatctgtaggttcttgtgttgttcgagatgccactggaaacgttaatgacactatcgtaacagagctaacaaactgtacttctgcagcctgcaaattaaactttgatttttcatcttgtgaaagcagtccttgttcctatggcctaatgaacaacttccaggtaatgagtatggtgtcaggatttacaccactaatttctgcaggtatattttcagccactctttcttcagcattagcatccctagtgagtgctcccaaaatatttcaggctctatgtaaggacaacatctacccagctttccagatgtttgctaaaggttatgggaaaaataatgaacctcttcgtggctacatcttaacattcttaattgcacttggattcatcttaattgctgaactgaatgttattgcaccaattatctcaaacttcttccttgcatcatatgcattgatcaatttttcagtattccatgcatcacttgcaaaatctccaggatggcgtcctgcattcaaatactacaacatgtggatatcacttcttggagcaattctttgttgcatagtaatgttcgtcattaactggtgggctgcattgctaacatatgtgatagtccttgggctgtatatttatgttacctacaaaaaaccagatgtgaattggggatcctctacacaagccctgacttacctgaatgcactgcagcattcaattcgtctttctggagtggaagaccacgtgaaaaactttaggccacagtgtcttgttatgacaggtgctccaaactcacgtccagctttacttcatcttgttcatgatttcacaaaaaatgttggtttgatgatctgtggccatgtacatatgggtcctcgaagacaagccatgaaagagatgtccatcgatcaagccaaatatcagcgatggcttattaagaacaaaatgaaggcattttatgctccagtacatgcagatgacttgagagaaggtgcacagtatttgatgcaggctgctggtcttggtcgtatgaagccaaacacacttgtccttggatttaagaaagattggttgcaagcagatatgagggatgtggatatgtatataaacttatttcatgatgcttttgacatacaatatggagtagtggttattcgcctaaaagaaggtctggatatatctcatcttcaaggacaagaagaattattgtcatcacaagagaaatctcctggcaccaaggatgtggtagtaagtgtggaatatagtaaaaagtccgatttagatacttccaaaccactcagtgaaaaaccaattacacacaaagttgaggaagaggatggcaagactgcaactcaaccactgttgaaaaaagaatccaaaggccctattgtgcctttaaatgtagctgaccaaaagcttcttgaagctagtacacagtttcagaaaaaacaaggaaagaatactattgatgtctggtggctttttgatgatggaggtttgaccttattgataccttaccttctgacgaccaagaaaaaatggaaagactgtaagatcagagtattcattggtggaaagataaacagaatagaccatgaccggagagcgatggctactttgcttagcaagttccggatagacttttctgatatcatggttctaggagatatcaataccaaaccaaagaaagaaaatattatagcttttgaggaaatcattgagccatacagacttcatgaagatgataaagagcaagatattgcagataaaatgaaagaagatgaaccatggcgaataacagataatgagcttgaactttataagaccaagacataccggcagatcaggttaaatgagttattaaaggaacattcaagcacagctaatattattgtcatgagtctcccagttgcacgaaaaggtgctgtgtctagtgctctctacatggcatggttagaagctctatctaaggacctaccaccaatcctcctagttcgtgggaatcatcagagtgtccttaccttctattcataaatgttctatacagtggacagccctccagaatggtacttcagtgcctagtgtagtaacctgaaatcttcaatgacacattaacatcacaatggcgaatggtgacttttctttcacgatttcattaatttgaaagcacacaggaaagcttgctccattgataacgtgtatggagacttcggttttagtcaattccatatctcaatcttaatggtgattcttctctgttgaactgaagtttgtgagagtagttttcctttgctacttgaatagcaataaaagcgtgttaactttttgg

SEQ ID NO: 38 - DNA, 1670 bp, Homo sapiens
ggcgggagggccgcagctccggcgccgcgccgtcccgccagaacgatcgccgcggccggaagagttggcgctcggggcggactccttggaactggcttagcgcacccatcccaccttcccgcaccctgggaccggtccaacgagcgctcctccaagcggagccttggagggcacggccggcaccattacctccaacgagtggagctctcccacctcccctgaggggagcaccgcctctgggggcagtcaggcactggacaagcccatcgacaatgacggagagggcgtgtggagcccggatattgagcagagtttccaggaggccctcgccatctacccgccctgtggcaggcgcaaaatcatcctgtcggacgagggcaagatgtatggtcgaaacgagctgattgcccgctacatcaagctccggacagggaagacccgcaccaggaagcaggtctccagccacatccaggtgctggctcgtcgcaaagctcgcgagatccaggccaagctaaaggaccaggcagctaaggacaaggccctgcagagcatggctgccatgtcgtctgcacagatcatctccgccacggccttccacagtagcatgcgcctcgcccggggccccggccgcccagcagtctcagggttttggcaaggagctttgccaggccaagccgaaacgtcccatgatgtgaagcctttctctcagcaaacctatgctgtccagcctccgctgcctctgccagggtttgagtctcctgcagggcccgccccatcgccctctgcgcccccggcacccccatggcagggccgcaggcgtggcagctccaagctctggatgttggagttctctgccttcctggagcagcagcaggacccggacacgtacaacaagcacctgttcgtgcacattggccagtccagcccaagctacctgcgcccctacctcgaagccgtggacatccgccaaatctatgacaaattcccggagaaaaagggtggactcaaggatctcttcgaacggggaccctccaatgccttttttcttgtgaagttctgggcagacctcaacaccaacatcgaggatgaaggcagctccttctatggggtctccagccagtatgagagccccgagaacatgatcatcacctgctccacgaaggtctgctctttcggcaagcaggtggtggagaaagttgagacagagtatgctcgctatgagaatggacactactcttaccgcatccaccggtccccgctctgtgagtacatgatcaacttcatccacaagctcaagcacctccctgagaagtacatgatgaacagcgtgctggagaacttcaccatcctgcaggtggtcaccaacagagacacacaggagaccttgctgtgcattgcctatgtctttgaggtgtcagccagtgagcacggggctcagcaccacatctacaggctggtgaaagaatgagagactcggggagcagggaggggggaagagacgtgtgtgcaggaaacggggacgtggggaggggacctgcaggggccagccccctgaagtgccaagagagctgagaggagcagttgtgactctacccaggaacaaactgtgcctgaacctgaggtgcccaaccccaaataaacccaagatgctgtgtattttcagaggaaaa

SEQ ID NO: 39 - DNA, 862 bp, Homo sapiens
ggggagccaagtttgccgatgcagtgaatgtggtaaaatattccggaacccaagatacttttctgtgcataagaaaatccataccggagagaggccctatgtgtgtcaagactgtgggaaaggatttgttcagagctcttccctcacacagcatcagagagttcattctggagagagaccatttgaatgtcaggagtgtgggaggaccttcaatgatcgctcagccatctcccagcacctgaggactcacactggcgctaagccctacaagtgtcaggactgtggaaaagccttccgccagagctcccacctcatcagacatcagaggactcacaccggggagcgcccatatgcatgcaacaaatgtggaaaggccttcacccagagctcacaccttattgggcaccagagaacccacaataggacaaagcgaaagaagaaacagcctacctcatagctctcaagccagttgaagaaaccttgccttttcagcttgaccctgcaatataacatgcacaggcctgcttgtgaatcaggactgaatgtgaaagggaagtattgagtgaggacattcccaaaaccaaaggacaactgaggagactgcccagcacataattaataaataagaaaatgagtgaggagttattaacactatttggaaaaaagatttcccattcacttgatattgtttgttcactcatttagtcattaaaagtgagattaataaaatctgaaaatgtatataataactttaaaaagccaggtaattaattaatctgcactgatattacatccacagtaccacagtatttatgtgtatgaattaaggattaaaagataatgtgataaataaacggaattc

SEQ ID NO: 40 - DNA, 2725 bp, Homo sapiens
gcatgccccatcagccttcagcttgagcccggcggcccccgcccccgccccctgccaccctgcactgccccggctcccccgcggcccccacgctgcagtgcggccgggccccctccccgcaggggccgcccccgccgcccacccctagcgcccgtggtggtggtggtggtggtggtggtggtggcccgggccgcagggccatgaaactacaggccgtgatggagacgctgttgcagcggcagcagcgggcgcgccaggagctggaggcccggcagcagctgccccccgatccccctgctgcaccccccggccgggcccgggctgcccccgacgaggacagagagcccgagagtgcccggatgcagcgggctcagatggccgcactggcagccatgcgggctgcagctgcgggcctgggacacccagccagccccggcggctctgaggatgggcccccaggctcggaggaggaggacgcggcccgggaggggacaccgggctcacccgggcgaggcagagaagggccaggagaggagcactttgaggacatggcctccgacgaggacatgaagcccaaatgggaggaggaggagatggaggaagacctcggggaggatgaggaggaggaggaggaggattacgaggatgaggaggaggaggaggacgaggaggggctgggccccccaggccctgccagcttgggcaccacggcactgttcccccgaaaggcccagccaccccaggccttccgcggcgatggcgttcccagggtgctggggggccaggagcggccggggcctggccctgcccaccccggaggggccgcccacgtagccccgcagctgcagccgcctgaccacggcgactggacttacgaggagcagtttaagcagctctacgaactcgacggggaccccaagaggaaggaattcctggatgacttgttcagcttcatgcagaagcgagggacacctgtgaaccgcatccccatcatggccaaacaggtccttgacctgttcatgctgtacgtgctggtgacggagaagggcggcctcgtggaggtcatcaacaagaagctgtggcgtgagatcaccaagggcctcaacctgcccacgtccatcaccagtgcagccttcaccctgcggacccaatacatgaagtacctgtacccctacgagtgtgagaagcggggcctcagtaaccccaatgagctccaggcagccatagacagcaaccgacgggagggccggcgccagagctttggtggctccctctttgcctactcgccaggcggggcacacggcatgctctcctcacccaagctacccgtgtcctccctgggcctggccgcaagcaccaatggcagctccatcacccccgcccctaagatcaagaaagaggaggactcagccatccccatcacagtccctggccgcctgcctgtgtccctggcgggccaccctgtggtggcagcccaggcagcagctgtgcaagcagcagccgcccaagcagctgtggccgcacaggcagctgccctggaacagctgcgggagaagctggagtctgcagagcctccggagaagaagatggccctggtggccgatgagcagcaacggctgatgcaacgtgcactccagcagaacttcctggccatggcggcccagctgcccatgagcattcggatcaacagccaagcctccgaaagccgccaggactctgctgtgaacctgacgggcaccaacggcagcaacagcatcagcatgtcggtggagatcaacggcatcatgtacacaggagttctgtttgctcagccgccggcccccacgccaacctctgctcccaacaaaggaggcggcggcggcggcggcagcagcagcaacgcaggcggccggggaggaaacaccggaaccagcggcggccaggctgggccagcggggctgtccacaccctccacatctacctcaaataactcgttgccttaaccgcatcactccccacccgccacccaccctggagcccgccggcctgggcagggggtccaggtgggccacacaggggccaggatggcggaagatacgggtggggagggaagatatccagaaaggagccacagctgacgccaaaaagaaaagaaaaaagatatatatatatatatatatatatatacgtatatatataaagaagaatttaataaaacaggggaaaaccaaggaacacttgaatttctcaggttttggacattcagagagatgaattgtgagaacagcaaagaaatccatcagaaaaacagaaagaggcagacgtttcccagggcgttcaggcagccctgatggaccgaaggctctggtgtctggtttggccccacagcagtgtgggccgatcctgtttacctcatacatccctgcactgtgtgttttcatttttgtctgctttagttctcttttattttctattcaccacacactcaccactcccagcttctcgtgtccagtgaaacccctgaaccaagatcactgaatttttgtttttttcttgttgctttgggaaatttttttttctctgtagggtttttaagaggtttcgggggttttgttgtgtaaatattctattttattcttggggggatcaaaccttaggaaaaggatatctatatatctatatagctatatatttgtgttccttcagggaaactggtcttgaaaaagcaagaaaaaaaagcaaaaaa

SEQ ID NO: 41 - DNA, 687 bp, Homo sapiens
  misc_feature: n=a,t,g or c
ttttcangagctggccctttcaactcagtttaggggcgcagccagctcncttcccaatagggctctttctgctttccctctccttggccctagatttgtaatccatgaaaaagcacaaggtcctggctccttgcggtcacattctggttctctgtgtttggtggactctgctctcactgttcacccagcactagcagtaccagatggttctgtggagtcctggggaatggagagagcacagtctgactccctgccaagtagccaggagttgacttgcccatggtccgctggctttcccaccacttcctacaggatgggatctaagagactcaagagctgggtttctttcagnactctgtactgtcccaaatagnaaacaantcacttngtggccagatttctgaatggaaatgagaaattgaattcagcttgggacttaaccaggctgactngntaggggggnnnnncannnnnnnnntngntcaannnnnnnnnnnnnnnnnnnnnnnnnnnnnnnnnnnnnnnnnnnnnnnnnnnnnnnnnnnnnnnnnnnnnnnnnnnnnnnnnnnnnnnnnnnnnnnnnnnnnnnnnnnnnnnnnnnnnnnnnnnnnnnnnnnnnnnnnnnnnnnnnnnnnnnnnnnnnnnnnnnnnnnnnnnnnnnnnnnnnnnnnnnnnnnnnnnnnnnnn

SEQ ID NO: 42 - DNA, 1524 bp, Homo sapiens
gtcgccttccagcccgtccgcctcccgaccagggcccgcgccccgtcccgcctctctcccgcccagccaaatgcaggccgccgccctccctgaggagatccgttggctcctggaagatgctgaagagtttctggcagaaggtttgcggaatgagaacctcagcgctgttgcaagggatcacagagaccatattctacggggctttcagcaaatcaaagccaggtactattgggattttcagccccaagggggagacattggacaggacagctctgatgataatcacagcgggactcttggcctgtccctcacatccgatgcaccctttttgtcagattatcaggatgagggaatggaagacatcgtaaaaggagctcaagaacttgataacgtaatcaagcaaggatacttggagaagaaaagcaaagatcatagtttctttggatcggagtggcagaagcgatggtgtgttgtcagcagaggtctcttctactactatgctaatgagaagagcaagcagcccaaagggaccttcctcattaagggctacagtgtacggatggccccccacctgcgaagagattccaagaaagaatcctgctttgaactgacctcccaggataggcgcacgtatgagtttacagctactagtccagcagaagccagagactgggtggatcaaataagtttcttgttaaaggatctgagctccttaaccattccatatgaagaggatgaggaggaagaagaaaaagaagagacatatgatgatattgatggttttgactccccaagttgtggttcccagtgcagacccactatcttgcctgggagtgtggggataaaagagcctacagaggagaaagaagaagaagatatttatgaagtcttgccagatgaagagcatgatctagaagaggatgagagtggcactcgacgaaaaggagtagactatgccagttactaccagggcctatgggattgccatggtgaccagccagatgaactgtccttccaacggggtgacctcatccgtattctgagcaaggagtataacatgtatggctggtgggtgggagaactgaacagcctcgttgggattgttccaaaggagtatctcaccactgcctttgaagtggaagaaagatgaaacccaggaaatatattcttccctctctcctcctttatgaggaaactgatcatcaaaagttcccactccctacttctgcacccaccaacgcctgactcctctctttgctgaagagacccaagtctcttgacacctcagagtgactgtaagctaccagtaagacaagtgggaagaggcacgttcatcaaacctgttactaaaccagcctagtcatagctcatccccatgtgtaaatgtgtccacacaaccacatctgccttttccacaagcttttcacaaagaaggtgagagagaaggaaaccttgggaggaggacattactggttgttctggctggtttgaaaagcacaaataaacttgggatgtggttccttg

SEQ ID NO: 43 - DNA, 442 bp, Homo sapiens
  misc_feature: n=a,t,g or c
tcagaatatcctcgtattcacaggcaggtcttgccagacttactgtagaagaaactaatcaacatccctgggaagatgagaaaatgagtgctgaagatgaccttccttagccttcctcttccagaaggactaagaagcatgcgagctacatctctcttttccttcctgttccctgggctgccttgcaatacctggtggggcacatacctgccttccatggcagacctttggcaggatagtagtggcagatagaagagagaaagtggaaaaaaaattcccctgtaccctgctagtattccccattaagaaactnccttggagcaaaccaaggacaaatataaatgagtttgtgagtgttagaaaagcaagcctttctgcctggcacataccattacataagccagaaccacacagaaactttatgctattttacccttaaacn

SEQ ID NO: 44 - DNA, 444 bp, Homo sapiens
cagagcagagggtttttctatttattacaaaagttgttacacaaatacagctgaccagaaggtctaaaaacagcccagactcttccaaccctcatgcatctgtagatagaaggagagctgtggtcttgctcacacacaggggagcccttcttagaagaactgcctgtcccttggaaggttcagagtcttgggtccagcagcagagaggagcccaacctgcgtggacaaccccttgaggcagcccttggtcacagctgctctgggtgggcagcaggtttaagtttcatagttcacatgttcccaccacacaagtcaaatcaaggcatgaaaataaaagggaaaaaggggaaggctggaaaagggagcctggaagaggttgcaggtaggggaaggagacacagtgggcttccgagaagctggcaatttcttgacttggatggagtt

SEQ ID NO: 45 - DNA, 233 bp, Homo sapiens
gaaagttcagttcagtttattacagtgtcaagtagatttacaactattgcacttatcattctggtgacagaaggccaaaactgaagattgagattttcctctaataaagataggttttcagaatcttcaatataagatgttaaaattataaaggcaaagatatatacctcatgttccattccatatccttcctgctgttgtacagtttgctgcaaatgataatttaatttggg

SEQ ID NO: 46 - DNA, 256 bp, Homo sapiens
gctcccgtctttcttttcttctttcatccatccttttatccagggctgcatagatagcatctgcttcctcatcatctttctcgtagggtccacttgagaagaggctcccagcatagccattaaactcatcgtaattggtgtcatttagatcctcgtcgtcatcgtcagcagcctgatttttcttcatctggtccccaacggttctcttgcctgggggtgcatggcgatcatccacagggtcatttgcatcacgggc

SEQ ID NO: 47 - DNA, 413 bp, Homo sapiens
gggctagaggtttgggctttaatggcagctggggtaaaaggaaacaaaaacagtaattctgaagagcacagggaacaggcagccaggaccagcctggcccattccaggccagctgagctgaaatgctgattctgtccagggggctgctgtatgtgtagactggtggcagtcttggggactgaggcctcttggagagaagggaagactgtcggctcagaagtccatggagctgtgggccaggtagtccttgcgaccgatgttgctgacctgcttggtctgcatagcctcgagtttggggcagtcagtgatccgatgacccaggcccccgcagaaggcacagccgcggctctcctccaatgtccagcatggactcatccccgcaatgcagcacctgcagcacgggcggcaccttt

SEQ ID NO: 48 - DNA, 439 bp, Homo sapiens
tagattagaataaaaatttatttttgtaaagaattatattttgtatttgcaaaagctgaaaatgctcataaaaattaccagcccagagcttggatttccaccggatccaccacgtgagacaaaagagtctgtcacttcttcttgccaggtttgagggccttttctagaccttggatgtgttttcgagggagctgatactcttcaagcaatagccagccgaggtggtggacctggtttccctggatctgcacctgaaggctgtccttggccccaggggagggattgacggtggtgctagcctggcatcgctgctgaaggatggcagccactgagtatgggtccagaccataggcctccaagttccggaccacggtcacctttttattagacgctctttgtgctagggtgatgtcaattggacagatttctccctttcttt

SEQ ID NO: 49 - DNA, 302 bp, Homo sapiens
ttttttttttttttttttttttttttttccgagcaacatctgcgtgtcggtctgcttttattacctcccagactgagcccccgacctggcccagcctggcccgtccccaatccagtgggctggccaggccacctgcaccagggaggacagctgctggcagggactaataaacccttccacctggccatggtggtggtgttctctatggaccgaggccctgaaacgcgggcagggaggggcagagaacgcactagcttgggggtgggcaccagctcagacccctcagcagctttgggccctcg

SEQ ID NO: 50 - DNA, 326 bp, Homo sapiens
  misc_feature: n=a,t,g or c
gctgtgatatctgaaattgccaaaggatattcagtatctgaaataaaaaggcaaagctgaatatgctgctctctacagcagagggagctgctgtggctggacagtatctgaaccaagcagatcttaaaactttgtaggtgttgagaaatggtggatgcatggactggcaccgtctgtggagccatgattatgtaggtgagacttgctcattatcttgtagtgttttaanatgtcttcacatttctaaaggcaacttgcttaatgcattttttaatttaaattttttatgttgtacagtttattttaaatatagttgccatttttta

SEQ ID NO: 51 - DNA, 461 bp, Homo sapiens
  misc_feature: n=a,t,g or c
taaagcctttctgcggtttgagatagacatgcagttgggctgggcantgcttgctgtgaatgtcaggtgttgagattagcaccacaccattccccgggtctgagtcttgcatgcgtctttgtccatcattgtctagaatgtgagaaaggtaagcatgggaacgccattttggggaagaaacaccagctatagaaagcaaagggatgcataggagataaaaagtctggggaaaaggatgtgaggtagcaagcgagttctcagctccccccagagaccagctgaaaagaagactgggtcagataccccctatctggcagatatatcacccctcaaaactggaacatgccccaggaaatgttcttggtggtttttttctccttgctcattttagcccaaactctaacaatgttgaaaatatctcgaaatttctttttttcttttctttttacctagaggttata

SEQ ID NO: 52 - DNA, 430 bp, Homo sapiens
ggcagctcagaaacatttattattaattttttcagtcacagttttcatcttgagaaagtggcaccctcgggagagcgctgggaatgttcagagcctgaatatcatccactctccaagtcccagaaagaactcaacaaagtctcagtcctaatgaagcccaaaccaagtgacctcttagctgggaggctttgtgcattttaaaaaagactatgtaagcttgtttcccagaagctctttctgtctgaccccatctgtcatcccatctttttccctgatctgttgcataatagctgagggaaagttgtgttagagtgtccctccatcgctaggccagctcaactcaatggcgttagtatcctgttcaacacactccattctgtaaagggccatataaaaatgtggcctgtcagattcacaaaagtggtagttg

SEQ ID NO: 53 - DNA, 339 bp, Homo sapiens
aaggagggatgtctgtttatttacagtgcaccctttgtgccaggcccttatgttcatgaccttacccaactctacaatcttgcaaggcggtttacatcatctccactttacagttcaagaaacaaaggctcagattcatagcccctgaatagtccctcatagtccctgagttcataagtagtggttatagtacaatctaagctatttaattccaaagccagtgatttttctggccttgagctataggtccaaaggctccaacagggccctccagactcaatggcagggtggtgtctgcacaagctggaagtgtccttgtgatgagcccatcaggagcgg

SEQ ID NO: 54 - DNA, 446 bp, Homo sapiens
ttttaacgttaaatcgattttatttaaagccataaataaataagccaattaacgctcaagtctgagagggctgcagtctttttaacaataccatagtccaaaaagactaatacttattgctgattcagctcacaatattacccctttccagacaacagcacattcaaatgttcaagaaaacattttatgggcaccttttatgggcatttgagattcacagagcaatgggccatggcatgccctcaaggaacttacaatgtagctggagagacacaaaacatccaaaacagacatgaggggctggctctacctccacacctctatctgaacaaaaacgattactggcttaagtcctcgtgttgtaacgcatgagccacaggaatatcttagcaagtacgcactttatcaagtttcaatttgacatgtcaaaacaaaagtttttatgt

SEQ ID NO: 55 - DNA, 424 bp, Homo sapiens
tttttaaacttcaaaacaagttttatttgggaagtttctcattttgttaaagctgcaagcaagtttctttcacaattacacttccagagatctagtagttttacggatctcagtgttcaaaagtgtatttcaaaatgaacaaaaccaaacccacaccaaaaggaaatagcgtttagattggtttggaatgtatagccattgatttcaggtgttctcagaaacaggttaccatttccttggaaaacaggtgggatacagtcaatgcccacagaaggaaatgtcttttaaataagttagttactcggacaatattattcactccttagaaaatatagtaggataacaagtcacagctggcagggtatgcagtacagcaccgatttcacagggggcttatgcaatcctggagtcagcggttgttggc

SEQ ID NO: 56 - DNA, 462 bp, Homo sapiens
gtgaaaaagctgcatgttttaatttaggaaatgagtagaagttcacaagcaacccagaataggtgccagcagtttgctccagtgggccacaccacagcagcagctcaggctctgcagaatcactgtgtccagtgcttcctgagatgttctttcagctgaggaatggaaggcagcagctgctggcactcatgacaacgaaggggcagcttcaagagctcaggcatcccatctcggacagttactctaccagcctcttgtaccatctcgatcacagcttgtgattctaggaagtattctgtattgaaagaattccaatgttttttgtttttaaggcaaggagaatcaaaatcctggctgatcacatgaagatgtacatggctcatactcggaatggcgtggtagcccaatcggaagcggagtttgctggacccagcaaaatctacaatcaccttttcccccaca

SEQ ID NO: 57 - DNA, 254 bp, Homo sapiens
gaaaccaccatagagaatttatttttttctcaggtgaagtcagtaactaattcttcctattcccgttggacacaaggagtctgtgagggggtgtgaaggaaggaggctgcggctgcgtcctggactccgtcgtgcggtagggagtccagcagggatggctcagccgtccgcacctggtgtgcagccggatctccatcctgaggaaggccttgaggttctcatcagccacgtgctcctccagggcagccagggcc

SEQ ID NO: 58 - DNA, 418 bp, Homo sapiens
tttaaagaacaaagcagaggggtttattataggaacattctcaaaccgcaacggaaaagatgtccgtacaggtggatggggatggagatccacctcggagtacacagacttcagggggcctcctgcctggcacgttctttctctcccgtatcacctaagaccctgagacccccaccctctgcaggagagacccacaaagaagcctcctccctgtggcctggctcccatcagggacagtcctgtttttagagcaagaacagtctgtacttcagacaggatcccaacccccacccaaattcaatgtcgaccgtctgagcagccagcttcattggctgcaaacgcctctctcaggtgagtcaaaggagacacgacggggaaccagggggccctaggtgaggatgtcatgggcctggtgctc

SEQ ID NO: 59 - DNA, 314 bp, Homo sapiens
taagatgacttgagtttcttgcactcaaagagagagacacagtcagatgtgtctatggtattgcctagaacgtcttaactactgagaaaggatgcgggggtgcacgcacgtggttactgagtggggggtggggaggagggcaccaaggctttctcaagatttacctgatgtgaacgaatcactggcgtgaagttgtggggaaaagaaaaaggcaggatcagaaaacaactgaaaataatttacgcttcttaaaaaatatctctgcttcgggtggttgtacaaaatgatttcctgatgcttgggatctgaatggc

SEQ ID NO: 60 - DNA, 370 bp, Homo sapiens
ttttaatgaataaagtttattggagattattaaagaaaaatgataaaataaggcaagtcctagatcagatttaaatacaatatttagaaagatggctatataattttagctaggaaaatcagtaaaagggaatatccttaaaagtgggaggggttcatataaccttttaaaatagcaagttgaggtgtaaaagcatcaccaacaatagtatgtaccttaatctttacacaattggacagtgaggagcaaagtgggagattctaccaatgccacttacagaacagattttcaagttaataagtcataaaatcctaatgtagtcataggctaggatggtgacgacaatctgcaattactggtcagagtgaag

SEQ ID NO: 61 - DNA, 429 bp, Homo sapiens
ttttcaagaagagctgtcttgctagtatgctcagttttctgagaggcctcagcaggtcataaatttaggtttgccatgggcaaactacttggtcccaacatgaaatatgacaatcaatttggcataaaagaggcacacgggaacatctgatggactaagaaataactattattaatgcaactacaaatatgaatatcttattacacaaacaggaagaattacgtatttttacagggtattggtgagcagtcaaaaagcgtggcaaattacctagaagttttaaaagttttaagtgatcaaatatttgcatcaaatataattccacccaataaagaactttgtatttaaatgtttttactaaaagcacaaaattaacctttgctctcctgtaggtaccccacctttgtccatacagaagatgcatgtgcc

SEQ ID NO: 62 - DNA, 405 bp, Homo sapiens
ttttttttttttttttttttgttttctcaactttattgtggacaggagaagggtaagtagacttgaaggttttttattttttaatgaagaaacaatttatcctgtgtttgataccagatgagactgtaagggtcacatactccttaagcctacacatcaattccaggtgaagtgcttcaggcttggctcattctgacacctaagaagggccctctaggccacggttgggaagactgtttttgccttagcgccgtgcaggtttgggcattatataaacttttacaggcttgctgaagggaatggtgccctcgatgctggtttccacctgtggtgacatctcaccaccctccatccaggggcattttggaatgcgagcactggagttgtaggccagcagcagcctca

SEQ ID NO: 63 - DNA, 292 bp, Homo sapiens
tttgtgcttgttttattggaagcaagactccagccagctgcagggctcatgggaggaggcctggagagttcagtcctgggtctccctctgggccagcagggggaaaaggggtgttaaaagagctagaaccctcagagatgctcctctgaagcaggggaaagaaaactagaaaggaaaactgtcccagggcggggagcggaatagggcccccacatctcagactctcctaccctcaagcagttaattctcaccccctgccttcctctgtcaacggtgggggtgattccaataa

SEQ ID NO: 64 - DNA, 389 bp, Homo sapiens
taaggccaagaaagtcagtttaatcttacaatataaatatatcatttagtcacctcagcttatccccagaggtgtttacacaattcccaatgaccagtgcagcttggaagcgactgaggctcgcaagtgggtggcacagtcggctcttcagtggctccaaagtgagcccctcacaacaggagacacttcagagaggtctgtccccagccacgcactcatgattgctttttagcagaagtcatggtcgctgaggccctgggtttggcaaaagcacagctgccagcagagcacagttctggtaggtggggccacggctgacctggccccagagctacaggaacaggcaggggccagcttggcttgcaacaccatgaaacaagcctgtgggg

SEQ ID NO: 65 - DNA, 434 bp, Homo sapiens
cgcaggtttcaaaaactcactttattccaatgtgaaatgaggacgtgatggtttaaaaacaagaaaaagttcttgctcagcggtggggatgctctgcttgcccgctcacgcccatcccccttgaaacaaggtgtctggacggaccacacccataagcggctctccgcaaacccaggcagacgcccgtctcctccgggtctcagggtggccacatcctcccccaccagggctctgacagcaggcacagagcagcagcacgggcagggtggagcgggacgagcgtgtgggggcccccgccatccccagagctagtctcagaccaggaagggagctgggcaccagagaagcgacatcacgtcggcacctgtaactcccgggatccgtaattgggccccgtttcccagcctcgcccccggccactgtgcgttcaacag

SEQ ID NO: 66 - DNA, 231 bp, Homo sapiens
tttttttttttttctagagggtttttctcaggggcttctcttagtgctgtagctgctgcaggctgcgcagggcctccgcacatgcgcggataaggccacacagctggatgctagtctccagggaggtgctagagcccagttcagcagaggcccaggtcagcttctgcaagagggctgtctgtgtgcaggccatgacatctgtatttggaggcacagcaggagcaggtggcc

SEQ ID NO: 67 - DNA, 274 bp, Homo sapiens
tcactggacagcactttattgacaccctcggacccggggcagggtcagcaagactcccagctggcatcagactgtgtctggcctgctgtcgccatccctgaggggtgcaggacagagccccatagggcgagagaggcctccctgggaccagaggaggatgctgtgcagccaggcccatccccagcactcgaggcctaggaggagaggtgggctctggcagcgggtgtgaggtggcagtgagaagccaggccctcaggtgcagctcaggcctctg

SEQ ID NO: 68 - DNA, 523 bp, Homo sapiens
ttttttttttttttttttttttttttttttttttttttttacagggtaaaggctctgttgacttcagcacgaccaccccagccccaggcaggcagaacagctaggtgaagaggcggacagtcccgtctgcccccgaggagaagacccacggctgggtggggtggaagatgacgtccagcactcccagatctcgggtcagcacgtgtcccttcagcaccttgacgggcaccagcaaggggttctgcagaaggtcattgtacaccatgccatggcagacgatgacactgccgtcgtccgagcctgacgcaaagagtgggtaccgcgggtggaaggccacagcccgcagagccttcttgtggtgtctcagcatcctgtatggcttggtggaaagatccaggtcaaaccacaccagcttgctatcgtagctcccacagatgacgttgtcacctgcagggtgcaccgccaggctggacacccatttgcagttgggcatcagcttcttggtgagctcctggcgcacaag

SEQ ID NO: 69 - DNA, 379 bp, Homo sapiens
ttttaacaggcagaaactctttaatcaggctttttttccaactctaaaacaaaatcccattttttccttaaatttagttcctcaggaacagagaactttgcaatgatgatctcaactctgcatcatctggtgactcctgattctgcaggactaagacatttcccaagagttctgctgcatcagccagtgaggacaagagttcttcagtgcggttcagctcaaggacacctaggcttccccagcaggggcttgcttgcaggtctgacaaaccacagagcgttgagcagatggcctgggactcccagacctggcagagggttttattagggcccgcctgggctgcaccgtttcatccaagtaccctgacccagcactcatc

SEQ ID NO: 70 - DNA, 302 bp, Homo sapiens
ttttttgtggatttaataagtcacttcacaccacagaaaatatttaataaatccaaaaaaaggaaagaagaatataacgacagaagagcttctgtctcagttctctgaaactgagtcccccataggaaactggtcccaaagttctcgaggggtcattgaagaaacttcggtttgctaatttttttcatccttttagtgttcaaaagttctagaaagactcctcgctgttttcagtttttaaacagtcaaatctccatctcccccagaaggtaacagtctggtgcagatccataaaaacgtgg

SEQ ID NO: 71 - DNA, 498 bp, Homo sapiens
tttttttttaaatgaatttaatctctctctagaaacagtgcactgattttacaaatgtccacatttggttttcagtttaccaagatgatgccagtatagctagtgagatgcagcaccccatcctcagccccctcgcctctggaagagacaccagactgcaaagggcaccgcgtacagaagctaacggaacttgaatgacaagacaaaaagagcagaatcagttagtgtgacacaacattctaacatgcctgattcttacatcaaatatgctaactttggggttggtagggggagacaaacaaggagaatccacttgggaacaatttgatgaagtttgcaaatcagcactttacccccaaattaacaacagcttgtatggaaaaaaaaatgctcttttaaaagtatatggtttggacaggtatatttgttttctcttgtagtttttgtaaaaaagtatcaaaaccttgggcttaaatatatatatatatatatatatat

SEQ ID NO: 72 - DNA, 354 bp, Homo sapiens
  misc_feature: n=a,t,g or c
gagtagtgagtagtgtaattaagtatatactgtatctgtnatttctaacactcacggagaggctggtgggccttgagagtccaggtttcctgacagagccgcacccccttcctggaccaggcagcctaaggactgtgctccccagatggtggggtctgggagcagagatctcaggacaggccatctcgccagggctaagtggaacccactctggggcaccggggctatacttgcttcctgtgcaggcctcaagcaagagccccctctgcctacaggtggggcaggctacctccggataggaggtgcaagcaggccacctgaggggtggctccaggctaggaaggcaggtgacac

SEQ ID NO: 73 - DNA, 383 bp, Homo sapiens
  misc_feature: n=a,t,g or c
gcaggctgtacnntatttattcaaattggcatagaaagacccccatcaccactaccatctttttaaaaaagcagataacatgaactgtcagacctccagtttttttatacacagcttacaagcttgaaacaatattccattgagagtaacaccaacattctttaagatttacaatttcttcttaacctgaaattttgctttgaaccataatactcagaccttcctgaaacaattctctaatacataaacaaataaccccaaacacttgaggaaaatttactaaaataaaattgagatgtttattacttttctactgacaggcagtgaaaatcactgggaaattatactttngtcctttttaaatgatttacattaaaatcata

SEQ ID NO: 74 - DNA, 429 bp, Homo sapiens
tttttttttaaggacacgagagagccatatttatttcacatggacaagcatgattccattgcatgctgaacatgaaagctcgtatgagcaaagtacccgtaacagcagaattatgtgcttttgtccacagggagcagggagaatcacaaagttgttttcagagacagtgtttttcaagcacagttgagaccataggctctggaagtcactggtttatttcatcaccaaagggtctgtctcccagggagtggccggagtgctttcagctttgcaatctctcaatgaattgataaggtctgaggagggctgaggatggtctcccatcccaccacccagagcatctttgaaggaaatgaagctcagaggggaaggttacatgccattgggaatttaacaagggccattcctgggttggacaatgacagggga

SEQ ID NO: 75 - DNA, 347 bp, Homo sapiens
tttttttttcctaaaaatgttttattttaacaaaatgctcaaatatctgaaattgggcaaaggtggagggtgggcaagctggctgaggtgtcccaggtctgtggctgcctagctgggtgaggggctggtgagcagctgctccagacaccctggacttcctccaggccccggtagcccgcttcagaccccggggaaggcagcggcaggactccaggttgaggtagagcaggcccgggcagctgctgatcacagagctgacagtgcttggtgtgacccgggtgcccctgaggttaagagagcacagggctgggtttgagcccccaggggtgcttaagaaggcagccagg

SEQ ID NO: 76 - DNA, 330 bp, Homo sapiens
tgtggataaatatattagcaaataaatatatttcttaacatagtgcctgattcaagcgtctgtctggttcagatataaatacccatgtgggtacctaggtgctagtctccccactaactgagggaaaaaggttcccaggtggggtcctctgcccactttgccaccacattcacattccaaatgggataatgcctgaggggccaagagtggtcaggctgccctggggtgaatgtcaccctgatgaggcccatcagctcttgtccactcagtgaggccagacttgtgctctaatccactctcctgtgggtccctggcctgtatggcttatac

SEQ ID NO: 77 - DNA, 380 bp, Homo sapiens
  misc_feature: n=a,t,g or c
tcatttagcaaaggtactatttgtagatattagccacttattaaaaacatattnctattaagattgttcttacattcttagatttagaacacctgatatctggacccagctgagtttttattttacagatcataaaacggatgaaagtatatcacagtaattaatgaagccgttctaatttagcttgaagagatttaaaattcccagtgatggcttgtactgctactgacgagctcatagactggagctcaacaaggtaaccacaaacagcatccaggcagagatttgtaaatcttctcctttcacaatttaaaacttggctgggattctcaacatatcttgatcaataatacatgtatacaatccaaaaggtgcagtgg

SEQ ID NO: 78 - DNA, 404 bp, Homo sapiens
  misc_feature: n=a,t,g or c
tttttttttgagcagcagctgtttattgaatgaagcgaaaggaaagcttccacatgctggaaggggacccagaagggttgccattgctagcttgggcggctagagctcanatccctgttactccctcccctttctttctttttgtccattaagagtggttcttccttcaatcccccctnggagtggttaattttgaatccttcattcgatcagttaagaactcaaaaccctgagtcangggggtcttttgtaaaagtccccaaactggcccaggaagtcccgccaactccacccctcattaggatgcatcactggcctcgtgcaccggcttcaccagcactngcacccnaatcaaaacaggggccagcaaggngcctcacccctgtaatcccagcactttgggn

SEQ ID NO: 79 - DNA, 547 bp, Homo sapiens
  misc_feature: n=a,t,g or c
atttttttctgcaatgtttaatgaagtactgaaaatgagataaggatttatcacaaagtatatggcaagggagaaaagatgcaacattattttatttcgagctactagatggttctcacaaattacacagggagtgatttaatgattatagacaacgtaaaatacattatctcattctgttttagagtttaaaagaaactttgagactaattcaatttcttcatttcttaattgaggtaatggatttgagagtccccttgctataagtacctcttcttgcgggactcatccttacgtgaaataccctcaactttctaagaaaatcacaaccacttatattttttcnatgatatcttatggcacaacaattacatattgaaatctgcatttctaaaatccaaacatgcattctgctgnatgcacaatcatgtgcagtgtctctgccatggggggtgcctttccctaaccaatcttccagctataaaagggcatgaatgagganaccctgggaaagggggtacatccttgaaatgtcacacccagatgc

SEQ ID NO: 80 - DNA, 467 bp, Homo sapiens
  misc_feature: n=a,t,g or c
agaatttacacaatttattaattttagtgttgtacttacaataatactatttaccattgacacagatgcatttcaatagtttaacaattgagacagtcatgctggtctctatcagtgaaatatcatatctgcttataatcccaaccaatactcggatattattaatcttttaaagttttgggaatccgagaggccaacgttgttaattcacatttaatcatgaacgaatttgtgcatctttacatatattacgttggtctttttaccctccccttgaattgctgatttatatccctagcccattttattgatttataaatattaatattacatacatganatggattgtccaagtatttcctttggcccatttnaaatttactggataaatgtttttnttaaagaaaattaagtccctttgtctacataagtcctacaaaatatttttccccaatttggtaggttcg

SEQ ID NO: 81 - DNA, 300 bp, Homo sapiens
ggctttaaatccaggatatttatttttaaaccagcagctggggaaatgtgacagggtaaatttttggtaggttacaagtagattcattctgtagcaaaggagggaagtataagacagtgtataaatctgtttctcaaaaggttgatgtaaatagtggaaccatgagtaccaagagcaaaacactggaaacaacttatatgtctgtaagcatctcctgctttccagactatggcccctctgtataatgcttgccacgttcttcatgagaagaatgagttccatctcagcctgctgggattt

SEQ ID NO: 82 - DNA, 407 bp, Homo sapiens
taactgttctgaaaagtttatttttaaaaaacttagagagagagagagaatcaaaataacctatgaagatttatagaaaacacaccaggtaaggaagggttctttcaaagcaaccacaggaacagttacgataacttaaaaagaaatgctttccacactgaactgacagcgctgcagcccacgcctgagtggggacggcagccccaagcccaggggaacgcgccacaggctggacccaggccaggcacacctggggagtctcttgctgctgaaaacctcagccatttcacttcatgtacttatcctgctggtcagccaggattttggcggaggacttggcatcatagaaaagttcactgatctcttcgacatgctctttctcaatggctgtccttcccgttgatttt

SEQ ID NO: 83 - DNA, 303 bp, Homo sapiens
gaataagacttggagccgctttaattaaagacttttttttttttttttttttttaaacattagatctctaattttaatagttgagaggaaggttataaaataaaacagacaacacagagcttcatgacggcctcggattggcagtcaacccagggatacagaaatgtaaacaaaaacagagcttccagataacattactgtgtgctatgtgactttcagaatacagcagcgtcccagacactctaaagtcaagtgaaacaagagattttagaatcaatctatacacatttcagagggcagtcc

SEQ ID NO: 84 - DNA, 330 bp, Homo sapiens
  misc_feature: n=a,t,g or c
ttttaaagaatacggcacttttaataggcggcagccccaggnggtgcgtggacagaccctgtccacagcgcctggctcccgtgctgcctgtccttccatctggaatgccaaacagaagctcctctcaggtggcatctggggagtaggtcccagtcctgaaatatacaaagtggcgcctcccactgggcagtggtcactgggctgcacggtcctttcaagtcctagggtggcccctcaggtcactgcttggccttcttcacaatgggtgcccacagcagagatgacggtggtcttnggagccgctgggcttgggtgggtgaccgtgacaac

SEQ ID NO: 85 - DNA, 253 bp, Homo sapiens
  misc_feature: n=a,t,g or c
ttttttntnatttcacagggtttattttatatttaaataaatcccaacaaatgtattcaactataaaatggcagcatacaactgttatgtggcagaaaatagtaaggcataanttagantantgtattgnnccttacatctgtagatatacttaacatttccaacatttccccatctaggattactctacatttttnctgggatttaacacttttcttaatgtgttgtattcacccaactactaggaccagga

SEQ ID NO: 86 - DNA, 304 bp, Homo sapiens
  misc_feature: n=a,t,g or c
ttttttttttttttttcttagtattaaattttattttaaaatgttaaaaacatgattaggnaaaaattcccactctacccatccccccaatatctatagaacaggattcagagcagtatttgtcaatgtttgcctaggatgatcaggatgtttgaaccactgggagttttctttaaactgtgtatttctgggtctactccagatctacctaatcagaatctctgagggtggngtctacaactgatttttaaaaaacgntcccggggattgtttttatactaaaatttgagagctactgggttta

SEQ ID NO: 87 - DNA, 438 bp, Homo sapiens
  misc_feature: n=a,t,g or c
ttttttttgtgcttcttatgtttctctgtgctgtattctggaagtggtcggataccatcgtctgagctgggactattctgataagatttctctgctatggaggagcctgactcactttcactgtccagattctggggggtatatgctggtgacttactatggctgggagagccacgctcatgctttggagtggaaccactgatgagtggagagccatagtttttagaagaagccatttgaggcctaagcccttctccactactttccccaggtttctgcaaagtcactttggctttaatgctaggggagcctccatcatgcttactgatgataatttttgccacacctgtgctccccacattttttgactctgaggtcttcttaggaagaatccactgaactcccggagtgggaaacctttngatttgtctttatcac

SEQ ID NO: 88 - DNA, 444 bp, Homo sapiens
  misc_feature: n=a,t,g or c
ttttttttttttttttttttttgcatatttataactgtttaataaactattcaaaattagcatctaaaataattatactttggacacacgaaggcatatatttggngagaacattgtaattttcattttgtaaactatatattctatattcaagtaataacacagcattgcctatacagaactgaggcctgcgctgagacccaaaacttgtcttttcctaaatgcaccactacggggggctantangnggtctgtccagatgctaagaccaggggacttcaaaatctccatcctgcggctttacaggtctccggggcagttagganctttatctttcagagggtgggagggggcctgacaggnggcttttggaaaccttttgtggcaactcctcccgggggcacattttgggggnctcagttccaacccaaatgccttttttna

SEQ ID NO: 89 - DNA, 391 bp, Homo sapiens
acaaaattaagtttataaatatttctccactgtacaaagttctcccagccctgcccaccccatcacagttcacatttctcatgtttttaaaatcccaattatatttattttttaaatcataaaatatatttttttctttgttcatatttaaaactatttacaggggcacagagaagccagagtggcccggccgagggtcaggatgagtccgtgcagggggacggagggggcgggaagagatggaagtagctcctctcggtgggcgggcgagggcgggcagctgtcctccgccgacaggtactgggctgtgggggcgtggggtgggggtggataggggtctgagtccgagttcaaatccagggtagtacttgctggccttccagcggctggg

SEQ ID NO: 90 - DNA, 351 bp, Homo sapiens
  misc_feature: n=a,t,g or c
taaaagttacagttttattttctccatgtttaatactgttaatatttgatagggtattagtatggtgggtacgaagaactgagcctagtacttcacatgaaatgctttttgcatagtcttcataggtgtaataaacagaatcatgattttcatgaatcctatctccaccaatatctgtttggcaaaaacattcagctggagtacagcctccaagaggactaaaagcagaggatcgaataggactaaataaaccactatcttcccttgatgccttcactgggcgaggagaatccggagcatcacacaggttaccatatgggagattctgggtttacgggggngttgggcttt

SEQ ID NO: 91 - DNA, 266 bp, Homo sapiens
  misc_feature: n=a,t,g or c
cagcacaaaagcgnagttactatttacagctccggctggcacctgcccacctggccagccgcctgcagggaggggtgggagaggggtcagccacatcagcagggaaaggatacgaagcaggtaaagacagaaggaaaatgggcgggtgcggagaaaccaagagggaggtggagctccagcaatgcggacacgaggagacaggagcagaaggggctgggggagacctgacctgtccttcctctctccccccagattcccatccaggg

SEQ ID NO: 92 - DNA, 400 bp, Homo sapiens
  misc_feature: n=a,t,g or c
gacacgtacacagatcaatgcttgggtttttaattttatcctggagaagctgatcaagttcacaacgaagctcctttaccagttcagccacctgatgggaagcagctacaaaacggatccaaccatcatccagggagacaacgaactctcctctttgaagctgcacattcacttggcctcctccaaacaagaccagcgggtacacagacaccatgctgcagtctcggatgaatactcgactagtttttatcttctcgtggtacancaggtaggggctgtcaaagtgtctcacctgtaacaaaaaaccttagatgatgacagtgatgtcactggcaacaaaaagggaccaaccccccagtcccacggntttaaatactgcctattaatggcttcccaattt

SEQ ID NO: 93 - DNA, 401 bp, Homo sapiens
gggcttggggggtttattaagtgatgctttagtctcagtctctgccagcaactgggagtggggtgactccactcaccccaggatttcccagacttgctattttagaggagagaggcaggaagccaactatcctctaagccacagcttgggaagctaggctagtactggggtgggggcagcagagctgagaccctccaccccgagcccctagcctgtgctatcctcccagcctgagggggaggagctgaggcaatcctggctgcagcctcccacacacagccctgctcttggtgcgccattcactgccctgagctattcatgatctctgctcccagatattcacctcaacactccaaaagccagccccttcaggtcttcagtcctgcggaaggcaaaaggag

SEQ ID NO: 94 - DNA, 346 bp, Homo sapiens
  misc_feature: n=a,t,g or c
tttcagaaagaaaggataataaagacgtttatttgcatttgtcaaccaacttaacatacagctgagaaagaaagactaaaaaccctctaataaagattgttaactgacagaagcattttgtttttgttntttttttgagacagggtctcgctctgccacccaggctggtgagcagtggcacgatctccactcactgcaactgccactttctggactcaagcaatcctcctgcctcagcctctcaagtagctggaactagatacacacagcactgcacccggctaacgacagaagcattcttatgatacgatctcctctcggctcacttcatctttagtcctggagg

SEQ ID NO: 95 - DNA, 412 bp, Homo sapiens
  misc_feature: n=a,t,g or c
tttttttattcttgcttttcttaataaacactatatcataagcttttccttatttcagtcttcaaagttataattttaatgtcttcacgtgatgttgtccagcgcacttatcataatttactagttggtttccngattattttaatgcttttatcctaggaagtcaggaaaaactctgcatacctatcctaaggcacttcctcattagctgaatggcaagtatttttagcctagtgaaaaccagcggagaagaaagcattagggacttacgttaacagccagcatatcattttcaaaggcctcacgcagcttcttcataatctctatctcagcactgggcacaggcctcaactgtgcccttcacagtggatgggntctttccggggttggtatatggctcaaatcctggcaa

SEQ ID NO: 96 - DNA, 441 bp, Homo sapiens
  misc_feature: n=a,t,g or c
tttttttttactctttgtggcttctttttattttgaatcaataatctagaagtgaaggtctccacagcccattatgccttcactgatccacctacttcccatgaacacctgccgaagaaagaaataaggcagcatgtgctaagatgcagtgctgcttctaaacataatttgtggggggcaggcatgaaacccaagttcagaagtgcttaagtactgaggtgattactcaactatgaagaggtctttcaagcgcacagttgatttttagcaagtacagcgtatgaagaccttcattttgattttataaaagtaggctatgttgcatgagtatctaaaagtggctgaaaaaccgactgcatgcttttaagcctaaaaataaccaaggagtaggagcccaaacatgtacatttcagcaggaaaagtgattaaacagganagcga

SEQ ID NO: 97 - DNA, 536 bp, Homo sapiens
  misc_feature: n=a,t,g or c
aaaataaaaccaacttttacttctctctttgccaccctttctctccaactccagaaaacctgatgtgctacaagaccactgtttgcaaactcaaatgaccataggaactcagcaagtcatataaatgagcgggaaatgccagatggaaaggcctatttggacagagacatgggtctaagaaatacttccctttcttcttcgctgtactttaagataaacaccaaaaacactaaaagcaagccatgatgaatggcacgtggtntttggtcaggngcccacgggagggtggggggatgggtggccgggccgggtngaattgtgagttctggctccggctcagctcccaacaactgtgggttttntcggagcctagggtcgagttgccaaatctttgggatttttcaaaagacacccagaaaacctgtatttgggntgtaaaatatcccttttcaattttcactactnactcatatcactttaaaaacactgctgggggntcaggtccantaaatntgacanccgcgggccagttcccg

SEQ ID NO: 98 - DNA, 273 bp, Homo sapiens
  misc_feature: n=a,t,g or c
gattccacaaggatttattggcaccggacctagcctggnnccgccccttcaaggaaagacactaacaaggaggagtgccggcaccgcaagagccctcccagaagcgcccagactgggggtcggggaggacgctgccattcgtggccaggaagggaagggcgattccggagaggngtgggcacggcgcagggaaaggccggntggtnggntnggcagggaggcggggtaccngccccttaagaaaggggaactcgcagacntagtagagacgcc

SEQ ID NO: 99 - DNA, 456 bp, Homo sapiens
  misc_feature: n=a,t,g or c
gctggtcttntacttggcagatgcacttcaaattaacctgttaaattaggtcatgttctttgagttttgtttctaattcaaactaatcagaattctttaactaatgcttttgaaaagttatctggccatatgaccttggtaaaaagccacaaatacatttgcttaaaatccaacctcaagtcacaaacgaacaagaaagtaatgacatcagaggatgtaagccagtagtctaatactcagcccaccacggtnttactgggagtcgctgacttttaacatttaattatcaattttttttttgggacagtctcgctctgntcacccggggctgggaggtacagtggggtgtggatctcgggcctcactggcaacctctgcctcnggggggtttaatttaattcttgggcctcgaggggccnaaaatttccctataggtgaggtcggtatttaaattct

SEQ ID NO: 100 - DNA, 361 bp, Homo sapiens
  misc_feature: n=a,t,g or c
acctttaaaatttattacataagctatacacacaaaatgaaatcctagttataaaagatgcatctagaagaataatttataataaaccaacaaaaatgagaatgtgtatctccaggnntataaatatatttaaatgttctcagtgactggcattgctttatgcattacataagatagtatgtactaattaaggtnttgaattcactgggttttagaaggctttaaaaaaaatccngataantcaacaacaaaantacagctcaactttgaactgcattaaantcccgantctctcattttgggtgaccnattccttattcccctcaaaaggtttcccaacaggangctttttcacaaactg

SEQ ID NO: 101 - DNA, 375 bp, Homo sapiens
  misc_feature: n=a,t,g or c
ggtcttgctatatatatggcccaggctggccttgacccagcatcaagtcgtcctcctgccttgggtcccaaagcactgggattacaggtgtgagccaccatgcccagccagatctttcttgtttttgatgtagatgtttattactaaatacttccctcttaaaactgctcttgctgcatcccatacatttttatatgttgtgtttctgttttcactcattttaagacatttaaattttgtttcttaatttcttcattacccattgggcattcaggaatcatgttatttaattacccatttatttgtgctgcctttaaaaggncccccttggttattgganttccagggggtatntcattgtggggcaggaaaggg

SEQ ID NO: 102 - DNA, 459 bp, Homo sapiens
  misc_feature: n=a,t,g or c
caaaaataagtgcattttatttaaacaacggaacaaacatcagagagcatcccctgcaaagcccccaccccagagcctgctgatggaagcggggctgcaggacgctctgccacaacggcagcatctccaactgcacaaagaccccttgctgccagggccgggcaccgangncttccttgcctgcctgcctgaggncncgtggaatcagggcaggggtggcacaggtagaaaagacagatgggaaacaatgcccatgaatatacccaaagtgtcccagggngggataaaagccatcatgagggaccagaagccaacccagtctttttttgggcctcctggggagaaggttgttttttgaggacctgaggactccagctgnaaatgggctccctgagggccccccaggggagcagggaggggggtntttctnagggncagcccctnaggggaaaacacagt

SEQ ID NO: 103 - DNA, 451 bp, Homo sapiens
ttttttttttcaggtaaaaccacactgcctttatttggctaaagaacaaaatccaaaataactcagaacaaactaagaacagacaggaaaattacagactgaaccccacttgaggaagacttccccacggactcacactggtgatggggcgaacgttcaagacgaagccagcagtcctttccaagactcttttgtcttttagggatcctcaatacaaaacaacccaactaatccaggatatgtgttcaaaacagtcagttttccccatcaaaaggcgggaaggcccacttcaaacctccaggaacacaacccaagtcatcccagtgttaaacctggtgcttccgttttctgcctcaatccgagcgctaacataaaatcttggcagacaacaatctttcttcttcaagaaaattaacatttaatggtataatcccaagaacatgttctactt

SEQ ID NO: 104 - DNA, 429 bp, Homo sapiens
tttagaggtctgctcatttattacagggccatgttttagctcttcctggatcgtctcagatctgccattcctctggatatgaacctgtggccgtggcagaaacccagaaatcagtaggggcttgttgtgttcttgtttgatcttcacgttaagatgctattgagcttttttatccatggatggtcttccaacaactgcatccctcacagtggcctgagtggaattaccgatatgagaagaagcctgctccaacacatatgcggcaccaaaatcaatagctccgcccagctcacgatattgaccagaatacctgatgtagccccaggtgaggagtgctattaacagtaagtccaaccatacagttgaacaacttgggctacaacctcaagacctatgaagccagtgaggcctgaggctatgtacaaagct

SEQ ID NO: 105 - DNA, 390 bp, Homo sapiens
  misc_feature: n=a,t,g or c
taacctgaaaagtataattcatggcaggactctatttcttctgccacaatatgatcaatagggtttcagacagtgactctcataacaccctcggagcgctcactctctttttaaagagtttattcttttcaaagtcgtgtggattaattccagtatgtcaagtcaaactttggctataaaatgacatggttgaccaagaaaaacacttatgtgctcacaattttccatccagtggcttctgaacatttaagactacctgcccctgaccaagtcctgttttgaaaatagcttaaacaatctattcaagaaatcatactgagccttttctttactggggggatggggcagaaaagaattagaacacacaacnaagcaagggaagagaaactt

SEQ ID NO: 106 - DNA, 273 bp, Homo sapiens
acgttttgtatgtttttttatttgctccaggtggggttttgactgtcactttcccacactctggattagttctgatcccaccacaaggagccctcgaattggctaaagtgagaaactgggcctgaagactccgtaccctctgccatcttgccgagggagtctccttttagaaaacaatcaaagggttattgcatgagtctggatgaatcccactctcagctgtccacgggcccgaccacctcatctagccccctttttggcagggagaacctg

SEQ ID NO: 107 - DNA, 282 bp, Homo sapiens
  misc_feature: n=a,t,g or c
ccaaaaaatcgctttcctctttaataccaacccaccccaggagacagctgtccacccccagttggggaaggggccacactgcccccacctccttgttccagggaacactcatttccctacaggtgatcttggggagagactgttcccaggcaaccctggagtctggttcagcgcacaaatctgtccagggcagatggccgggcccccgtgggcttggncttcgcctccttatgatgctgctgctgaaggctctgccggaccttgtcctggggaccggagacg

SEQ ID NO: 108 - DNA, 369 bp, Homo sapiens
cttaataaatttattcacaaaaagtgatattgcagagggtctgggggctgtacatgggcaggggcttggtgagctttgtacatggggctgggagacaagggagcctccaggtggaagggtattttttaataaaaaaaataatggagctacaaccaccccctcccccctccccgattaaaaagacacaaaaatagacgtctctgaggtaaacggggagcctggggcttaagggtgtttaaagggcttcacaggtgccagagcttagaggtgtcacaggcaccggggtggctcctgcatcagttggtagaacagcacgtagccctcgctggatgccacctggttttcactgacaggggagacacgagagtc

SEQ ID NO: 109 - DNA, 325 bp, Homo sapiens
cataccaccattttcatttattagcaataacagaggaaataccaatagcaccaattcaaaatgaatccacatgacgtgttttatccttacagctgtaataactagtaactaacatggattggaaagcacttcgcaaatgtaaaaagtgctgtacagatacattataattatcatcattaataaattagcccgattctcccagttcaaaaggcacgtaaggtcagatacatgggcttcagtggggcaaaatgatcacaacctacaatgtagcaatggttcacatgtgttggtaacaagttttaccccatgcaatcctgcagagctg

SEQ ID NO: 110 - DNA, 450 bp, Homo sapiens
agattcaagtttcagtattcttcttcaggtactgaaccaaaaaaatgtacatttaacattaatccaaagtctaagcctggatatattattatttggtggcagggttcctaaaagatggtctcttgctccttcagtgacagccacgttgacagaccacagaggtgcaaacacatgcacactaaagatttcacagctactcacaagtgacgagactgaccacatcgaagcacagttgtccctaagaacatacagctcaaaaatgttcatgttctctttaagaatactgaagtataaccatcctcatgaagattacagctccttcttacacttgtaggcactggacttactctgcaaggctgttgaagagaagaatctccagctccagtgtagaaaaataatacagaatacgtgagcacttccacgggtgagcctgcctcagaccacttccct

SEQ ID NO: 111 - DNA, 433 bp, Homo sapiens
cagagagtcttctaaattttatttagaataaaaccagcatggtagaaatacatcagtgatacaagtgaaaaagaacttgattccttaataaaatgacttacaagtgcaaaaatggaccccatatgtgctctgctttacttacacccaactctaacctgcgagcatattaggaaaaaagaagcaagtgcatccaataaaattatttgtaacttaatttgtatgaggcgggacaaggttgcttttgatccaagtctggtatttcttggttaacagggtgtagattccaggctttgtggcaacaccacattcatgacctccagagactatagcgtgggaagacacctttacagatcaaggggccccctggagtcacccttacaggaatccttctggcctttggaatcctcctggcacagaccatgtctttggtgat

SEQ ID NO: 112 - DNA, 246 bp, Homo sapiens
tttttttttccacacacacagcctttattgagcagctactgggcagtgacgctgccgaggcgggaatcccaccacagtcctgaccgcagctgggacccctttgcctcctctgacacccccacctcaatttgatacccacttcctgagcaaatgtgacccctagggcctgggattcccaaaatgaccaccccgaaatgcagcggccccaccgtctcctgaggccggtgagcaagggggcagcagtga

SEQ ID NO: 113 - DNA, 427 bp, Homo sapiens
  misc_feature: n=a,t,g or c
atgatcaacaagtttttattacataatactcttgatattccaaacaattcagcactttgtaaaaaaaaaaagaaaaaagagaaaaccggatcatggtaagtttgctatattaacatatcacgaagaaaactggaaacctattgatctatggaattgacatcttcgcatggatgctccacgcagcacgcttgcttccgtctggtgagtgatcatctttcggccagggctggaatatttggcctttctctcctttggctttgtcacccaaaaaacacgacctcagtggtgtcagctttgaacatgctaatctgcctnggcaccaccccattttagagactgtcacttggaggccctgaatgctccttcccattncctttttatgcaggctgctccatgnggaaanaaaaaaaaaaaacacaaccncaaa

SEQ ID NO: 114 - DNA, 392 bp, Homo sapiens
  misc_feature: n=a,t,g or c
gactacaaccagtgtttattcttgatttgtcaccactcttttcatagtcttgttttcttccacatgttaaatatataataaccaaaactttactaacatacgaatgaagaaaacatgcgcaagtantngcatggcaggtagtgaggaaatctggccagccgactggttcctttaccaaggtttgcagagtaggttgtgtttgaacaccttctgtgggtctgtgtcatttccaagttgaagaatttcagccaaagagcaacatgtcacattgattaaagatggttaatgacacagaaacatttctgttaatactaagggaaaaggctgttcttttatttatttatttttcctgagtcctcacgtttttcttctctgacaaatgtttgaaattc

SEQ ID NO: 115 - DNA, 561 bp, Homo sapiens
  misc_feature: n=a,t,g or c
nnttcacnttcagtcgcagtttattaaagttagaagtgtctccatccaccccctacagaggcttgcgtggtggttccagtctgctaaatatttcagaatggggacctcattctatctactgatttatcaaatctcattaattaatttcccttgctgatatgaggggttgggagagaagggggacgtgggaatgtaaggaagagcgagagtggtcgggctcatggggtttgatggactgtgacccaggctggcgttgctcctctccggatttcactcctggctgaactggtgccttcggtaaacagctgcttaaagagtgcggggactgctgcagggacttcctttttccatcagcgccactcgatggctccgaagtccgtgtagcaccaccgctccccgtgttctctgagctggcttagcttgaaggaacctcacaaaaccaagcccggatcgctgtcagccactcactcagtggccgcatggagctcctcggacagcgcaacgtcaaatgtcttccgtatcctgagagctcgctcctttgaccagaaatcntcatcctna

SEQ ID NO: 116 - DNA, 565 bp, Homo sapiens
  misc_feature: n=a,t,g or c
ttcaatcaacaaggctttatttacactccttaataaattcaggaaacaatttgatgtcatgtgcagccgccaaaaatagacaatgtagcacatcccactgtctggagacagctacttgtctatgctttaatagtaacccacaggcagccaagtagggttccatatatccaggtgttcacatacagcttccttccagcatcggtcataagcatgcctgcagtcaaaccacttaagatcaacattgatggtaaagtcttcttgatacttaatttggaattaacacttttcccaggaaatctttttcttctttctggatctggtgactcataaaattctataagcatcttatctttgatttcgaaacgttcatgcagccatcttctcatatgttcttngttcttctgggacatcttttttgtcgatacgatcaatgtgaatatgaatttttggacattctttgcagagaaattccgtcatggtcggtgactctccttcgctgcctccatcgtctttcccttcataaccaccgtaacatcataaattgcatctaaataattcctcatgg

SEQ ID NO: 117 - DNA, 405 bp, Homo sapiens
ggaaatgtgttaggggtctgaagctttatcttcttggcctgaggagtctctgcctccttggcagcctcattctgcttccgcttctttaatgaacctgatttggaaactaccactgccgcctttttcttttcttcttcctcctcctcactgttcttagctgcttttccattctgggcagtcagtgcagaggtgccattggccttgggggcttgtggtcttggagagcccttgcccttgagcttctcttcctcttcctcactggagtcatcagaagaagaactgttgctgctctcagcctttcctttctttgcagaggctggcttggaagggggctgcacctcctgctaccttctgtgggcttcttcttaactgcagacttaagatgtcctctcttcctcctcctca

SEQ ID NO: 118 - DNA, 441 bp, Homo sapiens
ttgagacttcaaaatcccagttccacagaactgattttattagccaatacataccaaagacgggtggaaaagaagtattatttttgtagttttctttcataatggaagccttatgctattacagactgcagttttccagtcttttgattaagccttgccagttgtgtgccgctgcagcaccaaagaaactgttttgcagcctgtcacctcctctggcaggcagccatcctggtctcggagagtggggtcagcaccagactggagcagcagctctacaatatccagaaactcacaggcagaggcataatgtagagctgtttggccttcattgtcctgacagttaatgtcagctctatgttgcagcaacactgtgactagttccttatgtcctcgatcacaggcccagtgaagtagagccctaccctcttcatctttcacaaa

SEQ ID NO: 119 - DNA, 441 bp, Homo sapiens
  misc_feature: n=a,t,g or c
tttcatcaaaacttgggacatacatcaacttcatttcttttcagtaccttaaaaaaaaaacatcagttctgggacataacaaagaaatactaggagaaatggtatctggacaggaacagaaatgtccacaactgcgagggattttcttttacactggccacagagcgtttattgacaccaccactcctgaaaattgggatttcttattaggttcccctaaaagttcccatgttgattacatgtaaatagtcacatatatacaatgaaggcagtttcttcagaggcaaccagggtttatagtgctaggtaaatgtcatctcttttgtgctacngactcattgtcaaacgtctctgcactgttttcagcctctccacgttgcctctgtcctgcttcttagttccttctttggtgacaaaccaaaagaataagaggatttagaa

SEQ ID NO: 120 - DNA, 610 bp, Homo sapiens
  misc_feature: n=a,t,g or c
tttttttttttttttttttaatttcaggtcaagtttattatacagaaattatattaatgggtgggataaatactttacaggagagggtcacactctcagacactttggctcccaaagggcttggagcttttgtgaggctgagcatcttccaaccaggtgcatgcactggtttgccaacatcctcaccacgcccaatccagccccttcacacactgacatcgcctacctgggccctcctngnggnnttnntttttatctaaccagtgtacacaacatatttataaccaattaatacgtgtgagtcatgatttgtttaaaatgtcagcttttgtgaactgaaggggatgggcagaaggcaggatgctgtcctggtcaggaatgtgacccagattttaacactgctcctgcacgcggtaccatggttggtgacgctggtgaagtcgtcaaaacggagagccagccagctgcggtgttggggtcnaagctgaaagggtacagattccacagatgcagcatcttcttccagacgcggtactgcaggagcccagtacttgcagacatcgataagcagccggctnggctngctctggctccatgggcanaaaatccg

SEQ ID NO: 121 - DNA, 453 bp, Homo sapiens
tttgcagggagtgcaacatttatttcataacagaaccccttttccacagagcagctgacagggggctgcatgaaacatactttggaaattaaagtgaactctccacttgggcataatgttatgtgggcacatggattggcttaaaagggaaacaagaatacttcaacatttgatcaacagtaggcagttgctggacattttagaaaaaggagaaatccattttttgaccatggctaaacatggggaaacagcatcacattttcctgaaccaccctaatcccagcccctcaagatccaccaggtatgcaaccccaaaccccagtcacatacattaaatctacacttttatttttttgttgtaaaatgtgctttttcctcaatgaactttaatcagtccaggacctacaaacacacacacacacacacacacacacacacacacacacacacaca

SEQ ID NO: 122 - DNA, 271 bp, Homo sapiens
taaaagtgatcatgttttaattatgggctaaaaatgactaatacagtaagcttgaatttaaaaaattaagtctaaataaattgctagggaattccacaatgggagtcaatgaaaatttttctctacatacaatatgatcattaacagactagttcttatttggaatgataaggcaaaaatagtaaaaccacacttttcctataaaaagttacacattatcttctgtagggatagctatcgtacatgaagaaacaaagatgtgatcactcta

SEQ ID NO: 123 - DNA, 279 bp, Homo sapiens
  misc_feature: n=a,t,g or c
gaggtcataaagaactttaataattcagagaagaagttcaaagtgtatttaaaagttgagaccctgctttacaatattttataattttaaaaaaaggcgtttaaaggtgataggtgacttaataattttccactttcaaaatgggtttctagacactgttgttcatgaaccaaaaacaaacaaacaaacaaacaacaacaaaacccaaacactttggcaagcaaagtattattagtacatagcagcttcataacagtttacttttttaatataaagngg

SEQ ID NO: 124 - DNA, 416 bp, Homo sapiens
ggaaatgaaattatgatttattaatttacataaaattactttatacattaaagaataatttttcaaattgttaaaaaaacaaagtctgaagctgtcattattgggattcgtgggacgtggtttgctcttctatcacctgcttcacaatttctgccagttttagtcgatctactttatctgtgaatccacgaccattccagctgaagctctgcagagtatctcttaggagtttgcattcccggttatacttccaagcctcctgcattacttcattcagtttctcatcttcattctctccagcctgggggagaatacactgagcaatcacatctcggagtttttccaaggcaacattggaatcctcggctccattctcatggtcgtggatatagacactgtcctttggcttggtggca

SEQ ID NO: 125 - DNA, 189 bp, Homo sapiens
  misc_feature: n=a,t,g or c
ttttttaatagagacaagngtctcactatgttgcccaggttggtctccaactcctgagctcaactgatactcccacctccgcgtccccagtgctaagattacagctgtgagttaccgtgcctggctctccaggggaatatttttaaaatttaagtcagatcactcctttgcttaaaaccattcaatgcc

SEQ ID NO: 126 - DNA, 459 bp, Homo sapiens
  misc_feature: n=a,t,g or c
tttagtgtaaattggcaaattttatttaaacctaatgaatccatgtaagactggactgtactgtctcgattatggagtctcattataacagcatccttaggggttacattgtggcactacctaaaaggtaaaagtgctgcaataagggctctgcaggcaattccatcacaaaaccccatggaataggatcacctcccaccaatcttttgctaagcactactctctggtaaagagtacagaagtttcaatgttttgatttttttttttccaggttggcatgatacaaatggcagcacacaaaaacaatgttaaaaaataaaccaaataaaaggctgtacacnagaactttatgtttattgcaaacaaacnaaccaaaaaaaaagggaaagagagggaaaggggaaaatggtcngaagcnccacnttttagggtaagaattttaaagcntccttacantct

SEQ ID NO: 127 - DNA, 536 bp, Homo sapiens
  misc_feature: n=a,t,g or c
atatttcatataattctgtacaccattttgttgtaaatacgagggtgcttgtgttctataaaatctctctgttgaatccaagtatgccttctcaaaattgtccctataaatttgaagtttatcctcaggattagaacaaaggttaacataggattctcttactccaataaccagctgagaatcaaaagcttctcccaatctctcagcatgtaccagcttcattgcactatcttggagtctgttttttatgtttgaaaagattgactcattccatgtatcaagcataagtgcctgtgcctgcttaataaactcaagaatatcttcttttaaagcctgatgnattttntgctggggcctttatcatccccaaaggacagactggcatggcacatccggaaaacaggatcaaaccactgctggttttggtaaccagattcctgggcggtaaaaggcttcaaaaccaatcggggcgcataaaatccccatttgtccttcaaactgaggagaacnttattcnttnacagattagacgtngc

SEQ ID NO: 128 - DNA, 531 bp, Homo sapiens
  misc_feature: n=a,t,g or c
cgctccaaacgggtcttggctttaatgtggttttcttcaaacccaaatggctgaacattgctatgaacataggtcatgtatattgagacactgattccgttttatggagccctgtggctcatgacaggttaacgagagggcacgaaactccagtgcgacgtgctccattttgaaagcagataaagctcccctcatcagagtgaagaggaaagtagccctgctggaataaggggagagcgtaccgcttgaagacagggtgctcagatgttttcattccaagcaagacagtgataacagcacagcactgctcccatccctggcccctttcctttctcacttactagggctttttgcttcatgcaaactctgtggctggactttgagggatccagaatttaggatatagggcgggtccttcacgagggaagtgaccgtggctcagccaaaaatcacaagatctcctcaagattccagaatgtattccaaagctgttgtaccccttntccctccaccggctcccctttgcaagct

SEQ ID NO: 129 - DNA, 401 bp, Homo sapiens
gagggtacatcgggggagaggagaggagaggagagcctctctgtgccttggtttcccatttgtgcattcagggcctctgcaggctcacacagggagtctgaggggatagtgtttaagtgagcactcaggcttcctctgaggaaaagaaatgaccaaagtgcagacttttattactgccattcctgctcctaatgggagcaggagtcaaaaggaaaaacaaattaaaaggggctaatgagaaaggaggagagatgagacagagagtgtgaagggctatgcgcgtggcatctcataaattcttattgagaatggcacaggtattaaaaaagtttctgggtagtctacgagaaatgtcaattattatctctactacaactacttacatatatctaatgggaaaa

SEQ ID NO: 130 - DNA, 350 bp, Homo sapiens
ttaactgacaatctgttttggttttttttttattgcaaattgttttatgactataactcagccatttgtgtgtggaatacacatgcgtaggggaagactatgaaactcacttgttactcaaacacacttgtttataaatacatatatacacacacacatatacatatccacacccaacttttttttttcccaaaattcaagtcaacaatttagtggcagagagatgctataaaaacattatttttagatgccacacaagtcatgagaaccattaattttatcatacaactgaagtacagccatcttgaattctacctggattaaagttgatcattttgttaccaatgcaa

SEQ ID NO: 131 - DNA, 387 bp, Homo sapiens
attttcaattctcctttattaacaatgatacaggcattcatcagcatagataattaaatgaaattaagtattccagatttcttccctctccaaatcatggcttatatctaatttcactaacaaggaggtaaagatttacatctaggaaaggctagaatattgaaaaagaagtccaggggagagcaggtaccaaatctagtgaagtacagtaaactgcttgggaccagcaaactaggtagcatatgggataatattaggagacaactgcttaaccaagaaaatgaaaatacaagttctattgagagaaggaggcaaactggtaatgtctctgaattcacaaaccatatattgtattaatgtaatataattaatgtataattgtattaa

SEQ ID NO: 132 - DNA, 155 bp, Homo sapiens
ctgacttgctgttgttttcttttttccccatttcttttagggactggggtaggaggggacaggaagaaaaaaatgtcattcgtcagttaggtcctgaacaaaaagaacttctgtgtggctgagtccggcctcctgtagcgtagggggattgggcc

SEQ ID NO: 133 - DNA, 331 bp, Homo sapiens
tagactggggaggagaatcctttatggtcacaaatgcttctggctcatcgaatgggttcaaatactgtggagtctgcacctctttaaagggattatagctgttattataaaaagagtcttctgttatttctaggtgaagctgtttcagtgataggttcttctgagtcaggatctccaaatggatttaattctgcagcatcaggatcatcaaatggatttgaattcacggtggccaagtccttttctgcttcatccaaaaagttaagtttgttgataagctctgtaattttagctgccttttcttcttggttcactctgttctcatcatcat

SEQ ID NO: 134 - DNA, 191 bp, Homo sapiens
tttttttttttttttttttttttttgacatagatacttatttatttgcatatttaaagtttacacacatgctatgactccaatgttttaaaaaaataagcccttaacagctctgagacacatggcctcttctgtatcccaagcaaatccctaaatggaggtagagcacgtgttcctatttttcacactctc

SEQ ID NO: 135 - DNA, 265 bp, Homo sapiens
aatgcacctttctcttattttattttttaaaataagaacttggcattgaaacatgaaacttgagttttgaaaactaccctccaagatgctgaagtatgtttactttttctttgtaaaagggggcttaacctatgtttctgaaggtctaagtctgtgcagataaattatatgacatgtatctgtttttaaaacactctatatgctggtactcacatagaaatagaagccagaatgagaagcctcccaaattatcccatcctgacag

SEQ ID NO: 136 - DNA, 193 bp, Homo sapiens
tgttctacttttaaagatatttaatgatgtttttcaaatcagtacaaaaatttaaatacaaaaatgatttgctattgacaagtctcaaatctgtcatgggaactcaaacaagttaccagtctgttcaccgttcattgtattctataaaatatttgataacagtcacccactacagacattcttttcccctgtg

SEQ ID NO: 137 - DNA, 355 bp, Homo sapiens
aacaggaaaaaattatttaatagtataacaaaatgcaaaataaagtacccaagttacaaaacataaattcctttggttcatgatcacaccactatttttaccttccacatagctacagacatcacaccctcaaagtgaagtcaaactgtccccctcatactgaagatgtcatgccaaaaccatcacataccccactgttcagtgaaactgttggcaacttacatggaacagagctgtggggtaggaaaaaggggaaagggttgcgttaaaaaaaatggggagactctacacatgcagaacaagttagtgggagggagtgctctgctgggtcaacacgccatgaaccacaccccta

SEQ ID NO: 138 - DNA, 355 bp, Homo sapiens
catcagcaatttcaattttatgttttctacttatttttatataagaatacaatgcaacaaaatattcatatattgcacaaacagtgatgtgcatacaaagatgctaacaacattggctggtaataggctttaccatgttacgatctaaatgcttgttcatcagagaatgtacaaaattctaagtttggcatccaaaagggggcttacagttattgaatatttttcccagccctattttaaatcaaattcaagtttgcctatgacaaagactgtctataagtaacagggcaagcataccaacatcaaaattattcttcttcttatctcacgtgcccctatttctcccaagtaagtg

SEQ ID NO: 139 - DNA, 297 bp, Homo sapiens
aaagtaataaacttattttaatagtgcaaaatgtaatctgctttccaaccaatgaaagaaaaacttgcaaaaaatttatgaaactagtcaataccttgaacaaagaaaaacacaaataactaagtaaatattacaattgtgtactccaaacccaaaaaagcagagaccgtcattacaagccaaatcttttttagagttggttgttgcaggttactaaaatgcgtaaaacaaaatctctacttttcagacttacagaaaagaaataactccaataagaaagctaacttaaggtttcat

SEQ ID NO: 140 - DNA, 456 bp, Homo sapiens
tttttttaaaaaattatctatatatattttaatatgcaaaaacaaatttacagatatctacacgagcaaaaacaattttctttacatttttagtaagctgcagcaatgaggatattttactttgaacacaaacatatgaaaccttcaaaaaagtccacattttcataggaagctactttacaaagaaaatacatgtactccagttgaaaatacaaacactgtctgctttatggtaaaaatcccaggaatcatattttctcattttactatgcagaatcagagttcgaaaaataataatctttctcttcttcatctaaagattccacagcattagtgaaaagttttccaataccagagttttctcctaagtctgtgttaaatggggttttccttcttggtgttggagttgagaaatcagtttcaactaattttttcttgatgttgcccagacaatac

SEQ ID NO: 141 - DNA, 203 bp, Homo sapiens
  misc_feature: n=a,t,g or c
aacagtttacttttttaatataaagattttncaatttacacttgtaggagtagaaaaaactaatatgctaagnctgtaagctacgcagcaaaaataatgatcttaatgaagccagaattctgtgaaaatgtgcaccacactgcatatatagtagctgagtaaatgtaaaccatgngcttattaactcttctatataaaatatt

SEQ ID NO: 142 - DNA, 382 bp, Homo sapiens
  misc_feature: n=a,t,g or c
aactacaaaaataagcactttactaacaacaggattctcagggaatgggggctttcagaggtgtcactgggctgcactgttgaggctgtgtgcatcagtggagatgtgagaccgaaagaaattatccaggacttgctggcccatgcggggctttttccgactgcacggagaggacacctgggaccttttggaacccatacaggtccctggctgttggccctgatacacacggaaaacctttttcatggcggtggaaacagctgcggtgtgaaattcctcctgcgtcancagcgagcacctggtggtacggtggtcactngggtctncccttccaaggccagcccatatacttgatatgtcaacttgatgtgagagaaggtgt

SEQ ID NO: 143 - DNA, 489 bp, Homo sapiens
tttctcttttgtgcattttattaaaacttgaaagctatggcttgcgccatcaatgacgcctattgggttccaatagcctcatgttcaaatctgactcgttagcaaatccacccaactcaacatcggtcatcttgacattgcaggatattcagcaagtctgaagtttttaatcgggaaggattttctaccgttactgaacaaataaaggttctttgtagcaatggctggaaatgcaacatgagccctttcttcacaccaaaagaactcataaatagttcaccgggtgaaccaaagactttatttttcaaaagcaggtaacaccaaagtactatgtggtatccatattcgttgcaaaaatgataattactggaattttccaaacatcaaatgaagggggatcaatggttaccactatcgttttcaaccaatatacagatgttcgctcaaggtctaggttttatttctacatagtagtattcacatgagttc

SEQ ID NO: 144 - DNA, 391 bp, Homo sapiens
atttttgtaggcctttattaactcatgaaaagttcacttgctataaatagagccttaacataaagtgattttcggttctttagcacaatttttaaaacaatttctccaacagaattaagtgaaatctcatttatcttaaagcaaattagaggacttataaaaaatctttccatttctatagagatgaaggaaattttaatacagtggttctcaaactggggtccctggaccagaaacatctgcatcacctgggaagtgattagaaatgcaagtgatcaggccagaccctctgaatgagaaattctggtggtcgagcccagcagtctgtttcaccaagcccccgccagatcgttttgctgctgctgaagttgaagaaccactgccgtaatga

SEQ ID NO: 145 - DNA, 431 bp, Homo sapiens
tttttttttttttgagacagggtcttgctctgtcacccaggctcaagcgcagtggcaccaacatagctcactgcagcctcgacctaccgggctcaagggattctcctgccttattcctgtactaaattattttttgtgctagcttggatatgacgtactgaaaaggcctctacttagatttgactacatattaatactgtagcaactggagtttactctttacagtaaataaaatattaaaattaaaagaataattacatattttgagcttggatagattcagaaaagcaccactcacataaaaggatgaaaaggacccctgtcgttttacaaacacctttagtgctgctgctatcttgatcaataactatgaaatacacccatttcaaatttcagaattaacacaaaccaagattaagtatgtcatttta

SEQ ID NO: 146 - DNA, 416 bp, Homo sapiens
gatctcttaaatgaaatgatgttctttatttcacgaaatcatcaatcttaagcacgagcaggaataaacaactcccagaagaagcttaattcattcttcctggattttcactgtgtgttattaaatcacaaaaatgacagtccccacactgccctttcccactgacaccaagtccaaccgtgagcacagtgcctctgcgaacatcctggcacccatggtgagcgctggcgaccaggcagtctctggccagcaacagggactgctcaagttaccgacgttggtaggagctgggctcgcatggccagaatggaaccccctagactttccacacgtcacctgcctgaacgctaactacaaagaggaaaggcaacttaaaggtgttttctagatgcagcatcagttagtccctctctttg

SEQ ID NO: 147 - DNA, 419 bp, Homo sapiens
ttttgattttaaatttcttctttattaaaaaaaaaaagcgtttttctgggttttttaaaacttctccaatacattaaaactttttttctcgccacatagcacttctttcttgcctctttcatttctgctcctggtgttgcctgcctcctgcaagacccagatgaagaaaccttttcaatggtcgagatctgagacttggagctggaggggctgaaggcttgaaggaaggtggttactggtcaaaaggagaagttcatttgcacaaaaatataaactggggaggatgagaccagcacatacacgtatggattgatctacaatccatataaaaaaatagacccaaattgtcattttacatttgcaatattatacaaaataatatatatttttaaacaacacatacccacctacacacacgt

SEQ ID NO: 148 - DNA, 432 bp, Homo sapiens
ttttttataaaaataaatatttattgccatttgaagctttatgtacacctttaaaagcacatgtacaaatgtgggaaattacaaaaatcaacctaaaaccctttttctcaaagtatacataaatgtacatccaagatcagtggtgctaccatcattagaataaaaaataagtctgtctggacataaacaagcaatcattttaagtgtcattcagatattctcctttatatttaaaactccaaaaaatactaagaggcccaatatatccagaaaattgtgttttcactttaccctaacttatgaatagtggtatacaaatatatttccatctttttgtccagccagcaaatgagagtctgtacccgaccatttcacaaaagaccaatgttggtcagagacaggtgggaggagggcagtacactgaccgagaag

SEQ ID NO: 149 - DNA, 284 bp, Homo sapiens
tttaatcagacaaagatgatttattttcatacctaaagcactttataatattctctggaaaatctaaaatcattctgttatcctaacatttttatactatcatcattttagaaaataaaaggcctgcgttatatactagaaaaatttcttcattatatgcaaaatatttatctcctctagtaaaggagattaaagaacaactgcaagaggaaggaaggtcctgaaagtgtttcatttggtatctacctaccccaaccccaagacataaagacagataaaggcac

SEQ ID NO: 150 - DNA, 194 bp, Homo sapiens
aaagaggcacgatctgatttatcagtttctaggaaacaccctctgggaggaaggcaggcagcgccgccggagaccttacaaccgcccgctaaccggggaggggggccggtagggcgcctcgggtctcaaggcgccgggagggtctgcgggccctgaaggtccctgggtccgagccacaagtcggggcagaaccg

SEQ ID NO: 151 - DNA, 354 bp, Homo sapiens
ttttttttttttttttagagatcataaatacttttaatatcagataaatcattaagaaattgcattctgtacttgatgaccacacgggaaccttgctagagtcaagagaacttgtcactagtaattatgaagacacctttacggtgagcgttattaaaaccctactagaggttttgggtgggactcaagagcaaggggtggccacctgtggacgagggttccctgttgttaacagaacacgttgcccacctcgcaagtatgcagcccaatcagtccccagggtctcggttcccgttgcgcccttccccatggccactgcgctcattcatgagcctagggtgatcaggcctccgg

SEQ ID NO: 152 - DNA, 398 bp, Homo sapiens
ttacaaaagaaaacacaaaaccagaatttattgaaagtaggtaccagctctgattagaacaatcagctcaaagataccattactcagaacaatatatacaaaaatctcagggaaaggagaataaaagaacttaaaagaatacaacttgaacaggactgttttactaaaatggtcttgttgcaaaataataacaaataccacagagagccctacatgagaaagccatgtgccttcaagcctggggatgaggactctagttctcaaattcttagaacatagcacatgattctccaggcagagaggctggctggagaatgaggacctcactgctgactctgcttaacaaagtccatgccccaggcacaggcacacatggaatgaggccaccaagcaagtca

SEQ ID NO: 153 - DNA, 465 bp, Homo sapiens
ttttttttttttttagaaatatatattccactttattagttagaaaaaatcatttaagccacatggtgcgcacaatgtccataacttgagcaggctttggcatcccaccacccccttcagaccaatacacactatgttggaggaacgactttaaaatgtaaaatgagaaatgggcactgaacactccatcctcactcccaacagcccacccacacaacctcttcaactgctatccaaacatggaggagctcttgtggaagagaggctcaacaccaaataattgagcataagacattcaagactaaaggaaccccagacagatgtttaggaagtagggttgaaaatatcaccatctcccaacagctgaagttgggacatctaagagatgtcagagccatactgctgaggaaagcacagcatacaccagaccccggggtaagggcgagatcaacctatctcatagcc

SEQ ID NO: 154 - DNA, 257 bp, Homo sapiens
aacttttttatatgttatgggaaaacacaatggattcattcacaaacaaaattagttatgcagaaccaaacatgcaaccaaagcacgccagagagacaggattccggagcagaacttaccccacgctttaggctcctgaagcagtggattttgggtttggaggtcatgaactcgttgaagcggtgggagaggggttccttttgctgcttgggagactgggggccgttgggaacagcagagggtgaggcagaggcagg

SEQ ID NO: 155 - DNA, 501 bp, Homo sapiens
taagcgatattgagtatgaaaccctggatgagcaaaagggatcttgaccaaagggataaatgtctgataggaacctgccttaccacacacaagcagagatgtcagaatatgtcttttcaaaatatgtttttgttgttgttgttatagttttttgcattccttctacaccagagaatgaagacccagattcttagaaataaagccaaactggcattcatctggtttctcacagcatcagtttgataaaaagaatttcactgtattttttttgtccccatgtattttgctttttccaatacttccaattatttgttggtctcactaactcttcaagcctggtgtggctgtaggaacagtaagcacagtggcggtgttgataactgacgtgatgtgggctaaacagacatgttaagtcaaaactattctctggaggaccatggaatgggcatccctctagactatgggagggtgaagtggaaaactttaatgaatatagacagc

SEQ ID NO: 156 - DNA, 235 bp, Homo sapiens
  misc_feature: n=a,t,g or c
tttttttttttttttttttttttttttttttttctgtcgccacagcagcggacacgtttaatggcaggcgcctctacagttacaagacatgcctgaggtcagttcgcccccttagggagcntccccgagctaaacacagatgacagcgacccagggtgctggaggcccggggtcacctgaggactgcagaagtcctgcgctccgctaactgtgtggacacgcggctgccagggga

SEQ ID NO: 157 - DNA, 186 bp, Homo sapiens
aactgctaatggagagctttaatcatcacatgtaaaagcaatacattcatatatcaaaattggctccaaattctttatcatcatcaccatcaacagtctagaaatgaaatgacacactaatataaaactttcctgtttataactaaaagatttatgaaacttttttttttaccctgaggctgatat

SEQ ID NO: 158 - DNA, 565 bp, Homo sapiens
tttggaggtgaccgagcgtcgagttttcacatctttattattgttgttgttgttgttattattattattattatcatcatcatcatcatcatcatcatcgaagtatttcacgtccagagctaagacaagactacaaacacaacacatagaaaattaataaaatagaactttgttttcttctgaggctcctcttcttacttctaggtagtatgtgctccttccagtggctttggggagggggtgggagagacgacaggtctgggatcagggagtcttcaaggcccccgctgaggggacagcgaatctaccattgaaccgtgcacgggggacatggacaaaatgagacgcgacagggacaagagcattttgctctgcttccaggaaacatcaagtgagtccgctcctcagttctcaccaggaagcctgatcaggctgaggcgagttcctcgggaaggaagggcgcgcgggatgctgggtgggctcgagtagtgaggcctcaaagcaccgccggagctttgcgagcggggcgtccaggaaacgctggcccccctttcttcgctgagag

SEQ ID NO: 159 - DNA, 290 bp, Homo sapiens
  misc_feature: n=a,t,g or c
ctgggttgtgaaatttgtagtttttatttcattatacttyyctgggtttttctaggttttcagcaacaaatactgacaaaaggaaatgaacagttttcgagacttactttaaaacagagttaaaggaatacacatgamatggtaacagtggctgcctctggggtcggcatgggagcmggccttcccttgcagcttgcgccctcccgtaccttttamattttgtaccaggcaggtattacttattcaamaataaataantttctacaaagrrgdtacaggtatatamctac

SEQ ID NO: 160 - DNA, 287 bp, Homo sapiens
attttaatttttattttttatggtggacagtgatcatttgccccaacagccatctgaagccaatagtcctgattattaaaaatcacaaagttatataaatgttctcctccttttccgaaaaaccatgttccatttttttccccaagaaacagggctgtcctgcaaagccttgaacggacagtgtaacccatggagctaacttcggttcatcaaagtagtgacagagatgttccaataggagacagatctctctggagtatgaagccagtgatgtacacaaatagctt

SEQ ID NO: 161 - DNA, 286 bp, Homo sapiens
ttttttttttaacttttattaatctttattttaaaacataaccagatgcaccttggttttttacattctctggttgccattcagtctcaaagtaaacaccgggagcatatgataaatcgtagtttaaggaagccatagcacttacagagttcctcgaatggttacaatataaaatctgtcataaaaatcagtaaaagatgcaaggtagaacacagtttaacactggtacaatggcagtagcagctttgcaaatgtttgtctatatgattccacaggactttttttt

SEQ ID NO: 162 - DNA, 302 bp, Homo sapiens
ttttttttttaagatctgtgcgttttatttttgtaaactatatctaaaacatacctcaatataaaaaaccagaaacaaaataacaaaaacggggtgagaacaaaaaatacagatgacaggttctgtagttatggtactgaactgagcttcctgtcagccaaaactagaagggaaacatgaccaccacctgacttgttgcagaggctttagatctgagcacttggatctgaaaacagtttctctttagatgccttcaaataagggacagtatccttgatgacaatacagtacatacattcaca

SEQ ID NO: 163 - DNA, 301 bp, Homo sapiens
  misc_feature: n=a,t,g or c
aagccnttgcatcatttttattttcaataaaagtgaattgtcttttacaaaaccatggcgtcctggnaaagttgcatcactggggcggcttctggccaaggaagaggctcttggtggagaggactntgaagccntcggcaggtntgcccncggttgtgctgtcggcgctggctgccttactgacttcaccctgcttcttcttggatttccgggcccctttcttgcctcctgcttttttagatacaggcttcttctggggatggagacttggcctttttggctggggggtgggtgtgatgat

SEQ ID NO: 164 - DNA, 283 bp, Homo sapiens
  misc_feature: n=a,t,g or c
tagatgataaagagcaacacttttattattcttccagtggctccccaagtcccttaaacccgtgcccctcctcccgtcccccatgcaccctccaaaggagatgacaaaggcggcagtgaaggaggagaaggaggaagagaaacacctttattggaagagctgtgtggacaagagancggggatgagagtgagagcatgggaggtggggtccaaggagctggtgcctttntcagcgccccttccagggactgcacagagacgggctggcacaccctggggtcca

SEQ ID NO: 165 - DNA, 347 bp, Homo sapiens
  misc_feature: n=a,t,g or c
ttatgtgttgtcgtggatgcggctccaccagggagctgggtaggttgggcgggatctccaccaggtggttcttggagatgtagagcttctgcagcttccgcagtgggctgaaggcttctcatggatcttggagatcttgttgttcaccaggacgagggcgtagaggtgctggagacccttgaagtcatccttgcggactcggagatgtcgttgttctgcaggtccagcagcgtgggtntcaggggagatctctttgggcacanacttcagacccagggtcggagcactgaaccacccgcaggtggccantgggcagccgaaaggacacatgggcgctttagggtngg

SEQ ID NO: 166 - DNA, 239 bp, Homo sapiens
  misc_feature: n=a,t,g or c
aacttttattttatattcaagataaagcatatacacaattcaatgtggaaataaattactagaaatactctggaaacttttccatttccctctcaaactcacttttttttaagctcataagtctttctacttgattttaagaaacatggcaactataatactaagaaaganctacagctttgtacaganacatagagccttgtcttgactataaggtttagttggngttttaatancaa

SEQ ID NO: 167 - DNA, 466 bp, Homo sapiens
gcatttaaaattgttttttattgttttgttgggcagtatgaaatatacagtcaaggcagattcgtacagacttgtaaagtcatctcaggaaccttttatgcttaaagtttcctcagccccatttatattcactactatcattcactctttaccactcatatcttccctgctgtctaatcactaatatcttccctcctgtctaatcactaatgtcttccttcctgtctaatcactgagttaagggaaaaatagtcatttacttacaggaatataatgggtattaataacaaaattccatttccccattaaaagctatgtctaagaaaaaaaatagtggaggcattatttaaaacttctaaatggcctggtgagtatagtcttagtttagcttccttacttttttgtattcccaacctggaaatggatgtcatcccggatcatcacagtatggtgccttttcagtacg

SEQ ID NO: 168 - DNA, 368 bp, Homo sapiens
ctttaaataaaaaatccataaatttattgcaaatctagaagtaccagaatgtcactaatacagaacagatcagcaatcttgtttgtattttcttccaaacatttaaaaccttgattattgacatactgaaattggcatacattttgttttcatgcagataacagaatagacatggagcagatccctcagaaatcagttataaatattaaattgtattgaacattcatagtaaaaaatatgtcgtaaagtgctgaagtcatgtaagtctgcaaaactgccacaagctcaaagttctcaagcagtgacagagatttgctacatccaccttgttttagattatgcctgtttttgacagacactttgtcatt

SEQ ID NO: 169 - DNA, 405 bp, Homo sapiens
  misc_feature: n=a,t,g or c
gttttgtttttaatttctatttttctggttaactcagaaaccttaaaaatttcttcattttgccactgtcttctctggacaactcttgctccctttccccctgggctgggcaactctatgagcacccacactcctccacgatcatgttctgaatgtcctttttgatgatgttttgaccatcatcatagtacaacatggacatgggtctcagcttggtgggcacacagcacgatttgaggttggcaaaggggctatggccgcnaatgcggtaagtggttgatgactgttgagtggaaggacagtgaggacccggacgtgcctgctatatggctcgggcactcaccctcgcagttagttggcatgatagccagagggagcaatgatccagtcattccagccgatgtc

SEQ ID NO: 170 - DNA, 476 bp, Homo sapiens
  misc_feature: n=a,t,g or c
ccatgctgtagtcagttacaaccctttaatccaacttttgaaatgcaaaacagtaatggattttttaaaaagtgaaactatctactttttgtttacatagtaatttagattaaagtcacagtcaaatttgcagtgactaaactcaaacttacttaaattagaatattatacagatctcctcacctacagcttccttgtttgactaggtttttagttaagaagagttattctgtaacaggcaactggatggtgagtttgaaagactaatctcttagattagactgttggcatgggcctctcaatcttgtcaagctggatgaagtcnggcaaaatctaggcacttctacaaagtctctcttataaaacaactttaaaaatatacttggtaaaataaataccttcaagactttgtttggtgggggtatgaagctcataccgtgcaaagtttccttttcaatcnatttaatggttaatcc

SEQ ID NO: 171 - DNA, 479 bp, Homo sapiens
  misc_feature: n=a,t,g or c
tttcttcaatcatcatagtgcattttatttaagtaccaggcaatccaggtgtggttttgtttgttttaatgagtaaaatggagatagaacatctgccttctgggtgatgtgctggactccacgcgcatggctttccctctcttatgtgctgcctctacgtagtgataggcagacaaaaaggaaaggaaatgtcagcttggctccactcccagcagatgagccaatccaaggtgaaagaaataacccatctcaaggtttgcctcttgggtcccaaacaaacattttgagggtgagatgcttgagttgagggatcaactgtgaccaagaaacaaagcacgtctaagtgactcacacaacaggtggcacatggtcagccacattaggccactggtgctaagccccccagaaaaaaaataaatccttaaaatttttggttccacaaaggttttccttaaaagtggaatgggtccnagtgatnt

SEQ ID NO: 172 - DNA, 276 bp, Homo sapiens
  misc_feature: n=a,t,g or c
ttttttttttttttttttgatttacctattcaggtttatttaataaatacagtagaggttaacagatgatagtgcaagttcaatagaagtagggtgatttaaaaacattctggattacaatgaaaactcacttatgtgggagtttgagcncacatttacagcctccaccagcagaaatcatgcaaataagaaccactgcagagttctttgtccacagacaccatctcccttcaggatggtcctgcttttcccccaagcacctgtgcaggcatctct

SEQ ID NO: 173 - DNA, 413 bp, Homo sapiens
  misc_feature: n=a,t,g or c
tggccagagcaggctttattggggccgtgtaaaccccagggagaggcaggacgtggaccacagagagtcatgtacaggctgcgctttcacttgtcttctctgtctcagtctcctgaagagcccgaggaagtcaagtctccccaccatgagtgaggggtctggtctgacagttgggccttcagagccaggcacgtggaccgtgtcagaagcgccacctggtggtgactgggatgctngcagggaggagctgagggcaaaactctagtggaaatttcccaggtcggtcccacgccccggtgacagggtgaaccctnagaggagcccccaaacttggaggcaattgtctttgaggtaaccactcaccccagcttttcagagaccagaggcaagacatttctggctaagagcatggg

SEQ ID NO: 174 - DNA, 477 bp, Homo sapiens
  misc_feature: n=a,t,g or c
gaccatatattctatttatttatcttatttattatccgtctctcccagctaggatgtaagcctcgtgaaggtggaggaggggggcttatttctgaatctccagcatctagattggtacctgccacacaaatatgtgctccataaacaaatgcactttttcttttctgcactccctgggttgcaggctgcatgcgaanacngtcctcaaggccagggatctgtctcaagcctttttgaaaaccacccctttcctacgtgccccacacccagctctagcagggtgccctcctgcccctgagcctgccctcatcatgcccattgccgaggcctcaggactgaatcacatttttggagtcttcccaggataagccaataggcatcattattctacagcgatgctcatgtataattataattattatcctatatgaacgatccattgctgctgtgtaattccaatggnaattactgggccta

SEQ ID NO: 175 - DNA, 253 bp, Homo sapiens
  misc_feature: n=a,t,g or c
gcagggtgggatgctttatttcactgtggcggggagggaacctggacagggggcggcaggcggggtggggggctggnactcaggcggggactaggcaggggaagggctgccccagnctgttgaggagaaactgaggccagccctgnggaaganctagcccagcngggtaaggagggtgggggaaaactgggtctgaaggaatgagggccccctccctctgggctttcctcctagagggcctcagtccctcctg

SEQ ID NO: 176 - DNA, 418 bp, Homo sapiens
  misc_feature: n=a,t,g or c
aacctagacaaaaagaagaaccaagtataataaaaaaaatcaagaaacatgacaataatggagactaaatccctcgatggaaagaattataatcataaatgtaagccttaaagagttaactttagatgtagacaagtcaaactgaagcactaaaaacatgttcgaccttatataacacattccttagggggaaaaaaagattttttaatattggaaaaaatatggttaggcatagtggctcatgcctgtaatcccagcacattcagaggccaaggcgggaggactgcttgagcttaggagttcaagaccagcctgggcaacatagtgagaccttgtctctacttaaaaacctaaaaagattagctgagtatgggtggcatgcacctatagtccccggctactangggaagctgagggc

SEQ ID NO: 177 - DNA, 304 bp, Homo sapiens
  misc_feature: n=a,t,g or c
tgtagagacaggcgcttactatgttgcccaggctcggttttaaactccaagcctcaagtgatcctcctgccttggattccaaagtgctgggattatagttgtgagccactgcgcccaacattcccatgacttttttgtgaaggaggcattcaccaagcttttcctaatctttaccataagccaggctctgcggtaaacaccccacaataaatgtttatcagaggacttagcagggaagtacattaaatgttaacgccttaatctgatactgaaaataaaagataatttcaacttggtttttnaa

SEQ ID NO: 178 - DNA, 228 bp, Homo sapiens
ttttttttttttttttaaaaacctaaatatttatttatttgcattatatttacaaaggtgggaaggagaccaaaggagaccccaagaacacccccacacctggctgaccaggccccttgcactgcagaggaggcagacacagctggaaggaacaggatttatgttgcatacttgaactacagcgagtgtaagactggtcctatttacagggcagaaacactgcaggtg

SEQ ID NO: 179 - DNA, 371 bp, Homo sapiens
gcatatataaataacatttattaacttaggctgtacaatatattgatttagtcaaataaaaaataccgtacacaaaaattgaagtaaaatctgtaagatgccattcagactgaattttatattctgaataagacaagggactgccattcacttaaagcaaaatggctccaattccgtttatctatctatctatctatctatctatctatccatctatctatctatctatctataagtctcgctctgtcacccaggctggagtatctatctatttatttatgagataagtctcgctctgtcacccaggctggagtgcggtggtgcaatctccggctcactgcaacctctggcctcccacgttcaagtggatg

SEQ ID NO: 180 - DNA, 400 bp, Homo sapiens
  misc_feature: n=a,t,g or c
ttttttcacaggatctacaaagtttattacagataaagtacagaaataaccaatctacaaagatcattatcataaagaacacgagaaaatgaaaacggagtctgtaggtatctgtgtttgttgtgcaatatcactcaaatgggtacaaatgagtttctcatatcaattccaaatatacacatacccttgtatataaaaaatgatattagccagttgtaatactcatttagcatcttgattattagtggcaatataattatcttaacatagggcatgtaacaggacaaatgagataaaataatgacaaccaagtaagttttatccagtccatttctaantgacaagaatccttattcaataccttatataggccactgacagatnttgagggctgtttgca

SEQ ID NO: 181 - DNA, 322 bp, Homo sapiens
  misc_feature: n=a,t,g or c
tttttttttttttttttttttttttttgggtggggagtacggantttattttattgttctgcgtctgggtttggttccttggacgtcacggttcctggatgggggtgggtgggtcccactccctaagtcatggtcccacgggcctnttgggatttttttccaggttcaaagtgcactgagaaagcttcacagttttaatacttcctagatgctcaactgaggcaaagtgacaaaatggccctcccacccccgcccgccacaaaantaaaatcccaagcccctggnagctgctgctcagcccttatgaaaaaataatacaaac

SEQ ID NO: 182 - DNA, 368 bp, Homo sapiens
  misc_feature: n=a,t,g or c
tttttttttgtgaaaaagctgcatgttttaatttaggaaatgagtagaagttcacaagcaacccagaataggtgccagcagtttgctccagtgggccacaccacagcagcagctcaggctctgcagaatcactgtgtccagtgcttcctgagatgttctttcagctgaggaatgggaaggcagcagctgctgggcactcatgacaacgaagggggcagcttcaaggagctcagggcatcccatcttcgggacagttacttcttaccagcctcttgtaccatcttcgattcacagcttnttgattctaggggngtattcttgtattnnaaagggattcccatgttttttttgtttttttaggggcnagg

SEQ ID NO: 183 - DNA, 368 bp, Homo sapiens
tttttttttgcagggtacattatttattttcacttgaacatgggaaagaaagtgtcacactcccccttcccctttatagggggagtgtattttaatcagcaacctcttctccatccaccctgtgtatgtgtgtacacatataccaccacagttgggaggcatgactaggctgacccagtcttatctgttcctcctttgaagagggtttgacaaatgggaaaaaggaaggagccacatcaggcagaggtttcaagccatgggaatggaggaaaggcggcagagaggagcagcaccagaggccagggagagagtgggaaagggccacagcttgtttttaaaaaattctattaatttgggaaggaggggtg

SEQ ID NO: 184 - DNA, 364 bp, Homo sapiens
aaggctgctgttaaataactttaatggttgatgtgggagtcacaagggagttatgtttgctccaagggttcttcagtgccatcctcaaagctggttagtgcagggaggtagggcagagttggttccagttttcttccaggaagggtttagggaggtcccagcgagccccaggaatgagtccctcggtaccatggcaaccacaatttaagaggggcttctgccaacccctgcagcctaccccagggtccagcagaggaacaggaggccagactggcaaacttgctatagacagcgccgtatccagagcccaactgcgcatgggtcattttctcttctggggcagatcctatgccagcacctttct

SEQ ID NO: 185 - DNA, 309 bp, Homo sapiens
tttataatgaatgaatatatttattcaggtcactgctttttaagctattttctaagtatatattgatgaattattgttaaattgatattctttaatagaaactacaattactgacattaaatataaaacaaatattttcattagaatcatgcaaaatctaaacaaatttgtataaaataccacccaaaatattttttttctgtatatgacaagacacacatcagatcataagcaacaagaaaacaaaaaagatatgaaaaagatataaagacctccccctcaccacatttggattcatcatatctatta

SEQ ID NO: 186 - DNA, 279 bp, Homo sapiens
tttccagttttagcatgcaactttattaacaacatgtaaataaaatctcaaaagaatacacatttcaatataaagcacagaagtatagcttactcaggatgaatagattcattatcaggtcacgttgcagaaataccaaaaatatctcaatttatatactatatagcacaataaaaatcagcacatgttcaggatctcaagattaattggtatccataaaattgcctccctcaatcaacatggaaaacataagtattgagtttataattacaatatgca

SEQ ID NO: 187 - DNA, 186 bp, Homo sapiens
  misc_feature: n=a,t,g or c
anctccagtttatttttttaagactaagagcagagtatgaaagtcacagccaaagcacttgaaaaaggcccaggaggataggtgggaccacatagggtgagcagggcaaggtcctgggagatggttcccggctcagggctggaagggagggggcgctgttgttttacggtctccaaaagtgtctgt

SEQ ID NO: 188 - DNA, 349 bp, Homo sapiens
atttctgaattctgaaggtctgctgggcttggcagggtgattctcattcttgtggtctcttatgaggtcagtggtggctagggctgaaaccatctcaaagccttcctcactcacatctcatgggtgatcccagctgttgctgaacctcatctgggactatcggccaaaacactcagaacttctccatgtgtctgggcttcctagaagacactgttattggtttttaagtagatcatagccaaagctagagtagcacctggacaagtcacatccacatttatggtatctccttctttgatttgataacttggtgatttatgtttctccctatgcattcctgtttgaaagc

SEQ ID NO: 189 - DNA, 301 bp, Homo sapiens
  misc_feature: n=a,t,g or c
ggtttaattatgggaaaaagcactaaagttaggtaaatgattttgtttgtcatgcttctcttgacaggcctgtggggggagaatggaaacagagatgccccttggcntgnagntagacacagcttgcagtgcacaggcagaggctctgggtcagtgcaggaagcagagtcaccgccagtgccttgggatggggatcacagaaggtgacctgtggctgcatgagccactgtaggactctgacctcagtgggacaggatgacacaggcagctaggaattctgggcaggggcaggtnggcatta

SEQ ID NO: 190 - DNA, 392 bp, Homo sapiens
agagatataacaaaaactttttttttttaaagaggatccacctggttcatgaaccctccctcactgctctctgcacatcacggccacacagcacctgcagggaggctgtggggaggtgtggagcaggtgcaacaggcagctactctcctggggggccacacggcggagagaggattcgatgcagcatgacgatcccttcctcccaggcatgacctcttctcagaacacgggaactgacaacactgcgagtggcaactcagcaggtgggcagagaagcagaaaggggccctcagcaccactaggccagctctcagaatcagaagagcagcctccagggagggagcagggctacagggacagcctacgggcagttggagcttctggtttgggca

SEQ ID NO: 191 - DNA, 211 bp, Homo sapiens
tttgtcaagagccaagacacaggtaatgcacgacattgattgctgcattttaccttcaaaatatttgtccttattgactgggtctccttaattaatgtacacatgtcattagaatgcagacggaggggactcaccatgaatatctggggttgattcccagatgtgtgttgcttctctattgcaagcagattcccttgtccggatttacttc

SEQ ID NO: 192 - DNA, 433 bp, Homo sapiens
tttttgccaatataagaatcttatttactgctttagtcaagaaggagatgttatttcacttgtgacttcctcccaagtgaatgagtatacaatttaacaaactaacacagttcagtttattaagttacaatctgtaaccacctaatcgtagctcagtgtatggtggatactagatataaacaagagtagggaagtctttggcacctgcatgatgcgtgccggcttttaaattcagaaagatgagaagctacaatgcaactttttttttaatctacagataccgccaaaagaagaaatgtttatcagattttgaatgacatagctgtaagttggcggttggcagctttccacataaaatttcatcagcaagtgaaacttgattacagcccaaactagacaaggcaattcaggtgcccggaccctgaagtccacg

SEQ ID NO: 193 - DNA, 258 bp, Homo sapiens
  misc_feature: n=a,t,g or c
caatgaataaacatttattgagcaccggcaaatcccagacactacagaacacacagaaggcatggcccacgccgagggcccagcccttagcaaagctgccacgctgccaaaaatggtggcgcatnagctcaggcgcaggctgaggctggggcttggcgggcagtgcacttggaacggggtcctaaggcctctgccaggttccagctggggcaggggtcacgtcgcttcctgagagcagancaaataaataatggagag

SEQ ID NO: 194 - DNA, 663 bp, Homo sapiens
  misc_feature: n=a,t,g or c
ttttttttttctcctgaacagatttattgtgagggtatgggaacgtgagatacatttgaattcccagttggaaacagtgaagaaatcagcaaatgtcttgtccctctcatttatttccacataataaacacctgtcatgggccaacccttgtgccgagctcagtgggcacagagctgaggagagaggccgacaggagctcccagcctgccaagcctcataacgtaagctgctctgtgttgagtctgctctgtgccccacgcgtcatttatgcaaatgctgctctagatcctcacgttagctgaatgaggcaggtactattgctctccctattccatgcaggaggaaactaaggctcagcgagacatatgccacgtccccatgggtccacagccaaaagctcagtggaattcaaatccactctgtctcctaagcttatgctctctcggccacataccctccccacccatgtatcgtaaggggcatctgtatattctggggtttactacccgcatggtaaagggntgtcagantattgctgaaatgccagtgtgtgctctcattgtaaatccatggctggattgggggnttactgaagcaagagcaaattgtgntcaaagatgatgtgtgggcaaaatgaatgncccggccgatttggccgggaa

SEQ ID NO: 195 - DNA, 423 bp, Homo sapiens
  misc_feature: n=a,t,g or c
tccccatcaaattattttattaggttaattaaacagcttaaagatgattccttttgtgtggtacccttctagaaaatatttcaagtttttaagtgaacttccaatacataaaacaaaattactttagcatacacaaatttcagatcaaaatacaacactctgtttctgttttcttacagttataaaatccagtcaatacaaactacataaaanagataaaacactttcactgatccttggtacaagagaacagcatgatggcaaaatgttccccaagcacaggtcctgggtttgtgagaagggaccaaccccacaatatactgaagcatgtaaacaaagtgcgtgctacttaatttaggttaacaaatcctttttgcatcagtattacttgtaaaccataaagcaacttttaaaaagaaaggg

SEQ ID NO: 196 - DNA, 375 bp, Homo sapiens
gggacggtgactcagaatctttggttgaggccttttttgctttcttcttcttttcttttttttctttgtctttttttctcttgtcggatttcttcttctccttcttgctctttgggttgctttgatctccaccttcaaccgtccccatccccttctgaagctcctcttctggctcgtccttggccccttggagccaagagaccccttccctttcttctccttgacatcaccacttgctttgtctctctttgctttccccttggaagtcgtggaggtcttttctggggaaacagaggcctccccaccttccccggcccccagcttcttcttcttcttgctcctgggggtcctggcagctggctggtctcccgataa

SEQ ID NO: 197 - DNA, 488 bp, Homo sapiens
tttttgcttcttgctgtgttacctttattatattcctagtgtcactgacactagtttaaaaacagcctgcaacaagaatattctcatcaccagccaccttttccacctttcttctttttctgttgctgtttcttttttgttgctggagcccctgcaacaagaatattctcatcaccagccaccttttccacctttcttctttttctgttgctgtttcttttttgttgctggagcccctgcaggtttctggtgtcttgggggtatgatgttacttgtagaggcagatactgttgcagcactgccaggtcttggggaggtgggtgggctgctcacagttttactggcatccacttcagatgaagctcctgcagttgctccctgggtcccttttccaatctgatccttctttttacccttctttcttccccggtagtaagaacgttctcggattggcagcaactttctggatctggggtaatcctcgtgcc

SEQ ID NO: 198 - DNA, 284 bp, Homo sapiens
  misc_feature: n=a,t,g or c
atgtcataaaatgggctttaatgttccctcttacaacatggtattactgcttacactggaactggcacacagctcccaaggttggtttactctgaggaatgaagctggtatcccccctggctgcagtgcantggagcggtcccaggcactgagctcagtataaactttggagtctaaatacccacatctcctgtagttcaccaactttgcagttctggaaccggcagtgcagattctgtgtatgccaagtaaaccagacactgttctgcctctttgtactaact

SEQ ID NO: 199 - DNA, 297 bp, Homo sapiens
aaatgaatgtaacaagcatttattaaaaactgtgctgcacaaaacatgttagaaactagccaggtgctaggagtctaatcaaggcaggggcagggtaaaaacatgggaatattacatggacaagcttgtctagcatggcagtctataacccttgagggtttacataaaataaaggaacatttttgtggctcaggctccccagagttctctttatgtttgggcagagactgccccatcccttagtgatcccaccttagagccaggttttcaaagtcatttctcccagtatatctgtct

SEQ ID NO: 200 - DNA, 316 bp, Homo sapiens
aaaattaataaaaatattttattgaatttcaggaacttggtacttttttaaaacttcaaatctttgcacacaaatcaccactatactttctagaatagtggaagttaggacttcaagattgtcacttatctccttgtgtcacacagcacagaaaccccaagtcctcacactgcccccaccccccttctggccatgactaccaactactctgttattctagcggaggacaatgacggaagtgggtagacgactgaaggagatcagctgtccaccgcgtactctactaaagtgagaggaggagcaaccgaggatcatg

SEQ ID NO: 201 - DNA, 580 bp, Homo sapiens
  misc_feature: n=a,t,g or c
ttttttaaataaattttttattacaatgacaggaagactctggatacaaacacatttgctaatataatcactccactggttacctaggcctagacgtacaaaaggacacccatatctcatcaggagaaagacaattttgagtttctgggtgtagtaccaagtggttatgatcaccacgtacgtggtctatccagttaactgtgtggcaatttgctatttcaagtcctctcataacagaaattactgaaatatgtggaacaccagtcaatataaagaattcatttttaaacagactagtgaatttgtgtcataaacacacttgcgtatggatattaggagagcattgcttgaatatctctaaaactatttttaggaattaaaagctttcatagttaatggtatgatattggccttcagaattcatattgataaaagcaaaccttagtcatttaacaggaatgtttaaattttagagattctaacatgcgatgccgaaaaatcctaacatttccacttagtaatgtcagggttgtgccagttctaatttcccatagctagtaacatcagaaaatatntatca

SEQ ID NO: 202 - DNA, 368 bp, Homo sapiens
  misc_feature: n=a,t,g or c
gcgaccgatttccaganccccctgctctgctgctctgcctgtccgcctatctgccattccatcatgtgtgtgcagacgtgcctgctccctggatgccagcctctcactgtctcctgtgctttttgccagcccaggcagtgactgacccgtgacccagcatgcaaagaagcctggagccaggggccagtggaaccagcttcctccaaggagatgacctttctgcccccaaggaaaccccttccagctgagcagggaatccggccggagaaggagcagcttaccgactgcgggtgttcaccacaggccaggccctaatatgcacccactangtttagctcagactcctctctacatattgaattggcaaa

SEQ ID NO: 203 - DNA, 473 bp, Homo sapiens
  misc_feature: n=a,t,g or c
ccgataatgactttattttaacatatttaattacagacataaaatagctnnggaggggggtgagccccagcctagccccaccatgggntcatnaggaggggaggcgcagcggggccccctgctgaccctctctctgggggtcttcctatggcggggcctattgcttgagtgggggaggagccatgcaaatgaggggggcagagaagacggtgacacagcggcctccgtgagccacctcgtagccctcgnccttgacttcgtggctncggatgatatagtccaggttgttctcttccaagaaggccttggtgacgtcaggcccaaactgacagctcacgcccgnttgctgattcgagccgccgttctgttggctgtggatctgancaagaacaaggtcacacatggggccctgaatcttgggggttttcgattccgctcaaattttccggatgtcattcanggtganaccggtt

SEQ ID NO: 204 - DNA, 554 bp, Homo sapiens
aagggggaatttgattgctatttggtattaaagagttttaagattcaaccacctggtacaacagcaggctctgaaggggaagccagacagggaacctagaggtacaagcaatgtctccccagctgtcagcctcaatgagaatcaccacccataaataagctaattattgacaagattataatctttcgaatatgttcaaaacaggtctgactagtgactatgagaatggagctatttagagttgatttaaaagaaaacactttattgttcagcaattaaaagttagccaaatatgtatttttctccataatttattgtgatgttatcaacatcaagtaaaatgctcattttcatcatttgcttctgttcatgttttcttgaacacgtcttcaattttccttccaaaatgctgcatgccacacctcaatacatgccgcgtgatcctagtagttttttcacaaccttctacaagtttttgggaaaacatctgttatgatgactttcatacaccttcacctcaaaggctttcttgcacctcggcagggcccagctcg

SEQ ID NO: 205 - DNA, 353 bp, Homo sapiens
  misc_feature: n=a,t,g or c
gaagttataaaagcttgtttttctttattagaatacttttttcaattctgatttgtcacaatttagattctttttctaagaataagcagaaatttacaaaatttaatttttatttatacattcatccgttcaatacacatttcaagaaagctgtattgnaccccttnnagtnggtaagttccagggccaaagaaccaaaataaatccaaggagagagaccaacaaatgtatatttataacacagagtaataaaacacaaataaatgtggagttatttaagcatgtaagatggtacatgctctaccaaggtatgggggcttctctaagacacaagatcagattaaagtcttgaa

SEQ ID NO: 206 - DNA, 514 bp, Homo sapiens
atttgcaaaattaaataaaaaaaaaaaacaggaacagaaaactagtccgaatcaggttccttcttctttcttctcgtcccttttggatgagtcccagactctgttttttctttgttgtgttcagtttgttgtgtcatccactctttttctagctgtttcagcatgtctggagtgaggagtccttgctgcaccaatctggaagcaagggacagctctcctgcatcggggctgggtggctcagtagctttactccctagagctttggtgccgcgtgtccttctagcttggctctttaaggttcctgacaatcgtgactggctccctgatggaaagccctccaaattcaacagcttatgcgtctcagacattttaatcaatttagtgatattgtgcacaccatcttggataataccatctagttctttctggagatctcgaataaggctggcatctggaaacatatccataaatcggtaacttagccacaagtaaagatccaagacatagggacagt

SEQ ID NO: 207 - DNA, 437 bp, Homo sapiens
ttatattgataaacatttttattctaatattatagtaataattcaagtacaattttctttgaaaagtcaactctgttaaaacaaaacttgttaaatatctttcatcaaacataagcatattcttttcaatcccccacagcagtcagagccatgtagcagagttaagattttttttaagcctactacattttgttattgctaaaaaatctgaattagttgtcaaggtttcagaggcagtcattaattaacttttgaaagctctatcagatactctgacataaaatcatgaatccaggtatcggtgtctggcaacgatgtgtccactaagtagaccactactttccggtcccaagggttagcattttcaatgactgtctgcaccagtgccaccagaggtttcttctccacatgatttcgaaacaccatagaagcctcct

SEQ ID NO: 208 - DNA, 246 bp, Homo sapiens
ttgcagtttcaccaaaattcctttatgtaagtaaccctctcaacagtgctaagaagtaagtattgacattttcattttgcagatgagaagcatggattctgggacgtcaggtctatgggccatccaggtcagaactctcttgacctcaccctgcaacgggtcctccaaggaccatgagccttgggggaggcgggaaccaggtctgattcaactccgtatgaccaggtgcagcacaatgtagggctc

SEQ ID NO: 209 - DNA, 420 bp, Homo sapiens
ggttttatttcatgcttactcgggagccagaaataaaaccaacaacaaattcagagtgctcctcagccattctaaccgctgctctagtgtagtccccagtggccagggagccggtggagctcatttccgcaataaggaggcacccccgatgcaaaggcaggcccacttcttgcaggcctttcacaactcctgagcctggcaccacgtgagcatttactagatctgcccaggaagctattttaaagatacctccttcatactgctttttcactgtgtttcctatatctgcaaacttccggtcttcaaatatcaagaactcatggcattttgcaggagttatcaactccttcatcacatccagagtaaaatcattcaaaatatctacatgagtcttcagcatgcagatactaggtcctaaag

SEQ ID NO: 210 - DNA, 562 bp, Homo sapiens
  misc_feature: n=a,t,g or c
tagatttctcatagatttatttctgcgtcatattatatatagatatatgcatatataccttttagcnaaaggagancaatctatatacccttcccttccccaccaaactcacaaaaggagattaaacccttccaggattgccatcaagcttcccgagatggccagggcaangaaagaatcatctctcaacatgttaagaaacggctgccattcttaggctctggggttgaagcagcagcattcccaggacccaagggccagagagaggaaaagaaatgactgtagtgtgacaggattctaggatgaacatgtccagtgactcctgggcatggcagactagctcccagaattctcagggtgtgagtaaaggtgggggccctatggctcttcagaggctgctcaataggtcaggggtagggtataggaactggggatcaggcatgcagggatggggtggcagaaaaaacgcctgtggggttatgctccagacagagcgacccccatcanggctacccactactcaatgacatgtaatgnacagggacagatgctgagctcctta

SEQ ID NO: 211 - DNA, 429 bp, Homo sapiens
tgggggtgactgtcctggtgaggggagcctgtttcaggacttgaacacgtgcacggctcgcaccacatactgccggcagatgggacactcactcatgcgcttgccgacttggtgcaggtaaccatgtgcccacactccagtaggacacagtcgatgacggcatccatgcagatgcgacacaggctgtcgtcttcctcatcctgcagctgcagccgctcgccataggacttttggttttcttcattctctttgtataaccggtttactttctctaccagttcccatttttcacaacagccagaatagttgacaaaattccgagccagaatttccttcagctggcgcacgcttcattccttccacatcatcaaggcttgacaagtcagacagttgaagctctcactctctccttggagagcccggggttcc

SEQ ID NO: 212 - DNA, 583 bp, Homo sapiens
  misc_feature: n=a,t,g or c
tctcccttgatttctggtttatttttacaccctctataaagtggtggatggccttgtcttcacacttcatttggtacagctgaaagttgccataccgcagatggagcagttgtttcgctacaggagtaagctctttactgaattccttttggaagtaatactctgcgtcttcatactgatctgctagagcatggaggctggcaagaatggaacagacacggaagagattatcattggcctcatcagctttcttcagatgagccacagcgtgtcctattagttccagtaactttcttttcccatacattccattctctcttagattcattacttggaagacttttgccctatagcagcacccaatttggcaatgcaggtaggcattgttttggtatgtattctaaagcctttttaagcagttcaatcgctttgtctggctcatcctttcctcgataaaacttgggctgcactgcgaagaacatctgttacacctggggctntctccaaggcttcntcaactaacttctctccntgngcgttcntcttcacnttcttcacgcatcttatgaagcttcagagncag

SEQ ID NO: 213 - DNA, 440 bp, Homo sapiens
agttataattactttattaaccttttggtctttcaacatttagatagtctttcttaatatttccaggagagtacctcatttttattttgaaaaccattcagcacatttatcttatgtaacatgcagagatattatctatctgtatttttaaaattttcctgttactcattgatacatagtacttaattacatgttattccatgtacactgaaaacaatataggaaatatatacatctaagacttctactttgtacagtctttcattaaataagaatacttacacatacattttcagatatttctaccttcctgtatgtgtttggaattgtatgtaggtagccactgaaagaatttgggccccttgggaggatggcagtggaagtccatgaagtaaagagcattctttaaaaagcagatttgattgcataccttttagtta

SEQ ID NO: 214 - DNA, 433 bp, Homo sapiens
  misc_feature: n=a,t,g or c
taatcatagacagcactgtatttcagtaggaaatatgcaaggaggaggagaaacaactgtcttgctgagggctagacgtgtgctctgaagaatggtgttccattttcagaagaccacatgacacacataatttctctactcaaaaggaaagatgcgtaaagtatacacatccacacaaagatgaagaagctaagaatgaattcctaatgtagttatctgtaacaggcatatgtgggaacacctggtcaggacttactttccccatctttggntaaggcaatataaaatcagatgaccaagttaactaaagtagttttgagctttgttctaactaaaacaaagtagtagttttacaatttttataatatacttaattgtactaaattaaatgttccataaagttcnctgggaagagaaggttaagaggataatt

SEQ ID NO: 215 - DNA, 440 bp, Homo sapiens
acatttaaaacattttatgagggataaaatatagtctttttctatcagtatgttcacacttcctggcctctcattgggaagctgtaagatgtccttcaataagatcctgaacacgcgacagaataatctcattagagctgctgcaattttctggaccatatggtgggtctatagtcaggaccccagccacacagagagtccttggagcgtctccctgttcagtgatggggatgtggttcttctcaagccatttctttaggctgttctttctctcttccagatcctctgggctgtatgctttgcagtctccagacgtgaacaaatgcatcagcttctccctcactctatggtccccttcattcatagtttcaacagtctgcacagcatgtcccataattccggtcacagacatgctgccatcttcaaggaagttcacaagg

SEQ ID NO: 216 - DNA, 361 bp, Homo sapiens
gaattttcaattagttaatttcataagctacagcagaggcgtggaccctgccctctccacacttgaagagataagcccctgggatccaagtcccagcaaggttggtgccacccatcttggtgaaagatgctgttgttcctgtggaaaccatcaccagaggtaggaagggctttgagcccaaaaggaaacaagagggcgtgaatccaggccatcctcaggggagggtgggagcccatcccaggcagagaggcctaagcctcagtgtgggccaaggctcaaaggtgctggcacaaggcttcccagggggagaatcagaaactcagcagtgaaagtccgcagaagggggaagaagcaggctgat

SEQ ID NO: 217 - DNA, 339 bp, Homo sapiens
  misc_feature: n=a,t,g or c
gcggctctacttcctttattgaggtctcaagttccagcctccgcccgtctcgggacaagaccaggcggggttctgcacgcggccgcccgggcaagcccagcagatgccccgtcaggagtactcgcagngtggccgcagcctgcgggacagtgggagctgccttccagccacttcatgatgtgctgcaggtggccgccgtggctgcagccctggcaccacacgaagagacccttgactacgtggtggcagacggcacacatgctggcgcanggtggcacctttcgcagaccagccccggctgntcatgggccgcttncagtggctgcagttgacgtgcag

SEQ ID NO: 218 - DNA, 210 bp, Homo sapiens
  misc_feature: n=a,t,g or c
gcattttcactgaagcatttattatgcaaaanaggaaggctttagcatgccagtataaattaaaacagtagaaaaaaagcagagcagagagcgttttccatccatggcctgtgccctgtaatgacgcagcagtatcctagtacattgacgggtttttcctgtcctgccactgtccgntgggcagttataggtcccaagtgttgggtcttc

SEQ ID NO: 219 - DNA, 289 bp, Homo sapiens
tttaacagtcatgatttattattttattaataaaatcacagctttaaggcacaacgtttttaagccatgaagaaaaaccctcaagaaatgctttagtttgacatggaaccaacaatcttcatgggcaaccttcaaatccagacgcaaaaagatggtcatggagcaacctcatggaagaaaagcacagaggaattcatcatggtaccttgggcttttcatccaggatctgctgacgtatttccttgtgtttctctacgagtttttcttgccgtttactttgcgcttcttc

SEQ ID NO: 220 - DNA, 418 bp, Homo sapiens
ttttttttttttttttagaatccaactggactttatttgacacagaatacaatgtggctgcgagaacagcaaatggcaaagacaaagcagaaaagacacagttctatctaatttataattaagtgacagaagggcaagtcattaaatgaatcacaaaacagttaagcttgatggaagaattctttttctggtgtccatactttgggaattcctattgtctgttgtccaacaggcacagctgttgtgttttgagccagtgagagagacagtgaagtgaaaagcacggttacaggctccccgtgcaacggtacacacttctgaagtggcagactcttggttagcttgacattcaatgcagatccatgctgtgattcctgcagatggcacagttattaaccacaacatcccaagcccagac

SEQ ID NO: 221 - DNA, 402 bp, Homo sapiens
ttttttcagttgtcaaactactaacatctttattttgtcaagatatttaacaatattaaaaagttcagatttcttcatggtcatgtcttttaccagcttttcaaagattcattcagtagtagaaacagccaaatgctgctacaacgcagaataaactgtcattcatgaaaacatcatgagtatagttgtcagtgtcagcatcccagaaacagcgagaagccatgaatactccttcacctctttgttctccaatcactacttgcaccaccattttgtatcggtcaaatcccatttcttttaatttatctttaatgttttctgataaatgttttgtaagctgaggcatttcttctggagaatattcagcatttgccagttcctccttgagcacagcatggatac

SEQ ID NO: 222 - DNA, 348 bp, Homo sapiens
cgtcgtccttgtcgcggctgcgggtgctggtggtcggggtggaggagccggcgtcgctgtctcgcttgcgcttccgtgatgatttcttctgccggacctcctcttcgatctcctccagcgtgccctcctcgatggccttcagggtcttgagccactgcttctccgtcagtgagtcgctgtagtccacctccttgcggtggcgggagcacggccgaacatcttctcctcctcctcctcacaggtcagccgctccacctccgcgtcgtccttgatgatccacgaggggagctcgtcctcctccatgaggcgcggcttccgcattgggggttgcgggccttcctcgcgcct

SEQ ID NO: 223 - DNA, 141 bp, Homo sapiens
actattttgggtttagaaaaattcttttggattttattccaagtgtgatgggaagccttggggggttttaactagggaataatgtgatctggttcacattttcaaaagatcattctgctatatagaaaagtaatgaggcaa

SEQ ID NO: 224 - DNA, 427 bp, Homo sapiens
tttgaagtttcaggactttactttttctgagttaatccaggtgcatgagacttttccatatacacggataggctttgtacggttccattttgggtcagtggaagaattttcacaacacaaatgacattataaagttgtcttctctggcctggtactggggaccactggtcaaagacaacgtgagacattgcggggacttcctggagctgcagcaaccacagcagagaacttgtaatcaattttttctgggagaacatagcagaggagtaagacaacatttatcctagcttcggataggatcctcttccatctaggcagatgggatccaagagacagcagagatcctggagagaggtgatagaagagggagacacaggcttggtgtattggatcagctgcagctggtgctccctggagcagcaggctg

SEQ ID NO: 225 - DNA, 304 bp, Homo sapiens
gaaaaacaaactggtttttattctaaacacgtactagggcagcatgctggggggcctctcctgcctccagaggtgcccctgctccccactgtggccctctttagacagagtaggagctcgggctacccacatgcagcccagcccttagcacccaagggcctgcctgtgccccactctctgcctgggctagggaggcccaggaccctcggagtgggcaggcccaccctttccatgggtcaccagggtctcagtgcccacttgtcctccaaccaacagtgacacggcaccctccacacggcctgtg

SEQ ID NO: 226 - DNA, 490 bp, Homo sapiens
ttttttttttaatcaatataaataattatattctgcttcagaatgaaaacatttccagaacattgtgggagcctcgcttgttcatcaacattacctgtttttatcaaatactgtcatttgtgcaacaaatgtcttttccccatcctcacgatttcattttcttctggctggaactcttcactgacatcaatattttcatggtttctccattaatcattccattaaactctcttcttcttggacgagtcactctaaatagcaacgagtaagacttcaccatgtggctgttactaggttcaaattcattactggaaactgcaagggacgggaaatttccaggttttgtttgattgaggtcaggattcaaaggcacctgctttttacctgtgggaacttgccttattggacaacatacatcctttctttttttgtggcaaactttcacaagcaggacttccagggtaacagaattttgttcattttctgagtt

SEQ ID NO: 227 - DNA, 268 bp, Homo sapiens
ttttgaaaacttcacagttactttaatctgcacgggttccggggaactcctctgcccctccccgctccccttcaccagcctcccaccgacctggcgtccccaactcagcccaaggagctgtcagggattggaggcggctgggtcctccggcagaacactaagacgggcccccgggcggcccggctctgcccgggccgaaggcagcgacacgagatgcccgaccccgaggagcccactcccagtgcgggctgaggttcagcagccccgg

SEQ ID NO: 228 - DNA, 178 bp, Homo sapiens
ttttggcgtgatgctgagtcacatttattaccagactttcctggccccatgctcacaggcactggtcactgagtcaggcatttgccagggctgtctgcttgggcgactgctgcaggaaagcaggctgaggccccagtgcccagtctgagccttagaaccggccctcaggagggctcag

SEQ ID NO: 229 - DNA, 442 bp, Homo sapiens
tttttttttttttttttttttttttttttttaaattgaaaggaaacttttattgagtcatgttttcaaagcaatctagtttttaaaaaagttgaagacaagacagaaaaaagaacatgacacctaagagaatcagacaggacagacagacgggagcaggggggcggggacagcggctccgtggaggtcagatcttctccatcttggagatgaggtcgtcgcagatcctggtcagctcctcgttctctttagtcttctgctccactgtcttctccagcgactggatgcgcatctgctccttcctcaggctggcctggagggcaacgcttccgcctgggccttgctccggacctgggcgatctcctcgtttgccagctgcagcttctcctccgcgtgggccttcagggcttggtacctctggccctcctgggtgatccttgcca

SEQ ID NO: 230 - DNA, 487 bp, Homo sapiens
ttttcaagaccatccaataatttactgtgatcccatctgtgcccgacaagcggccacagaggcctgggaggggagctaagggctggggttccggtggcatttgggatgttcaagacagtctgtgcacagcctccctgggagggtctgcagtcacctcggcccacggtcccggggtgactgggctccagcagcccttccttccttccttgcttccgtccttccttcctcctccttccgtctgcacctccttcctgcatccggcacctccatgtcctgagcttgtgctgcgtcaggagagcacacacttgcagctcatgcagccggggccactctcatcaggagggttcagcttccgcagcttgtgctgccggatctcacgcaccaacgtgtagaaggcatcctccactccctgccgggtcttggccgaggtctcgatgtaggggatgccgtagcttcgggcgaggtcctgagcctgccgagattccac

SEQ ID NO: 231 - DNA, 320 bp, Homo sapiens
tttttttttttttaaattatttaagacatttactttatttttcttgtggccatccatttagtgaagaacatcagtgtattaagaaggtccctctttatcacatgatatttctaagcagatattcaggaatgctcagaagattccactttcagtctcctaagacataatttaaagtgggacttgaacagaaacaagtatcttcagactccagctgaaatcatagaagtagtttctgtttaaatcctgggaaaccttagataaggtatgtgaaactgaaaaaagatcaaatcagcacacacagataaagggtacaacagata

SEQ ID NO: 232 - DNA, 439 bp, Homo sapiens
tctcttttgagacagagtctcactctctcacacaggctggagtgcagtggcacaatcttggctcactgcagcctcagcctcctgggttcaagcaattctcgtgcctcagcctcccaagtagctgggattacaggcacgtgccaccatgcccggctaatttttgatagagacggggtttcaccatgttggccaggctggtcttgaactcctgaccttaagtgatccgcccgcctcagcctcccaaagtgttgggattacaggcgtgacacacgcgcctggcctgaaggttacttttcttttcagtggtttggggcagggagttacacagcttaatagattaagaagaataaaatgctgaatgctatcatttctttctaacatatttagcattaataaaaagtgagtatttctgaggtcatcacaactgcctcccctcgtg

SEQ ID NO: 233 - DNA, 372 bp, Homo sapiens
ttttcaagttgcacattttaatttacaatttttaccaataaaaaggattagtttacaaaaagggaagtcctttatacaaaataaggattttttttttccatttgtaaagagaatccactgtcatgttttgccttgtcaagtcaaaactcaaatagcttgttttggtaaaattattccagaaacataatccagacaaaatcaataacgtcatcagcttcctaaccatgtttaagaggaataacttcatgaacattttgccctgaactgaagagttctaaatacttgtaaacctttaggaaaaaatgactgctcgcaggcagctgactggtaagagggtacaccagagactccgggtcactcactgtcagaata

SEQ ID NO: 234 - DNA, 422 bp, Homo sapiens
ttttttaaatttttaaatggttctttattcataaacttgatgcaagtttacaaaatttactgtacattgccaaataaatctgcaattaaaaataaaatccattaaacaaagcatgccaaatgtgcagctatcagtctgcttgccatcaggatattaaagaattcaacaatgtattcaagatttagccttaggcttaaggaactttactgatttaaagaattctgccttgtcacttgttatctgagcaactggcaatcagaactttatacaaatgtaatcaagtgaacaagaataccagaaaatctatttactgctctcttaaccaaaatggaatcaaaagaaattaaacacacacaatgtagaaatgacaagtctctcagatgtggtttacaaagttaaaaactgaatctcaaagctaatgc

SEQ ID NO: 235 - DNA, 486 bp, Homo sapiens
gagacagggtcttgttctatcaccccaggctggagtgcagtggtgtgatctcagctcgctgcaggcttgacctcctgggcccaagtgatcctcctgcctggacctcccaaaagtgttgggattacaggcatgagccactgcatccagcttgcttctaattttcctacccaggctgttttaaacctagttctccagctaagtaaaatgtgcccaaatggaaaacatctaaatcttctgcagcccattcttcctgtgtctttgtgttgacaaacctctaatcttccatgtctttgtgttgacaaacctaaccttccatgtctttttgttgacaaacctctaaccttccatgtctttgtgttgacaaacctctccatgggtggtgcatctgaccctatcccaacatgccttaggacgctcatctccttgactgtctgccatcccctcccaaaactaagtggaggctctgtcttttcctcctagtttgag

SEQ ID NO: 236 - DNA, 485 bp, Homo sapiens
gcaaaaaaaaaaacaaaaataagtgcattttatttaaacaacggaacaaacatcagagagcatcccctgcaaagcccccaccccagagcctgctgatggaagcggggctgcaggacgctctgccacaacggcagcatctccaactgcacaaagaccccttgctgccagggccgggcaccgaagcatccttgcctgcctgcctgaggagtccgtggaatcagggcaggggtggcacaggtagaaaagacagatggaaacaatgcccatgaatatacccaaagtgtcccaggaggataaaagccgtcatgaggaccagaagccaacccagtctttttttggcctcccggagaagctgtttttgagacctgagactccagctgaaatggctccctgaggagcccagggagcaggaggggtgttctgaggacagcccctgaggaaaacacagtgcctgcagagggacagcccccagcaccctccggcag

SEQ ID NO: 237 - DNA, 450 bp, Homo sapiens
tttttttttttttttgatgcagggctgctttttatttttctaagctgaggcatgtgaaaattaatttccagttactagcaacaatatggtgttacaaacaaaagaagttgtacagcagatataatatagaattaaaacagaatagatttaacttatggaaaggcatgtcttttctcctgtttttcttgatttgctgaggaatggtggaagtaaggtggtctggcagaggacacgaactcacatttagaaatctctaatcccatccaaacctttgcctccataaaccgtctgagccaagtggttgttgctcctaattttagggatccttgggcatgaagatttcacagtcttcctggcagcttcttctaaagtttaatcatgcttaagttatgtttgagcctgagccgcccggaggattgaatccaagcaatgaagaaaaagcagcctgac

SEQ ID NO: 238 - DNA, 410 bp, Homo sapiens
ttttttcaaaaagataattaacttttattattcattaaaaatgagctttctaaaatattagtaaatttcattttaagctctgtcttgaagtgctgataccactgaagtaacatttttcttctttcaattttttcttgtaaaattatagttttctctttttctaaaacagcagggagttccttccagttcttgataaagataaagggagcacccatggacttgagtaactgcagaggagcaccgtggctgacagatgtattcccacagttgccagctgtcatcacgtcttccaccacaggaatggagccataggagcaagcctcatagattcgatagcattctgtgtttactccgaccgggcacaatgtgagatcactctgaagcaaggcatcttggtaattcttaagact

SEQ ID NO: 239 - DNA, 264 bp, Homo sapiens
aaaagccagttacttttattataatgaatgagaaatactatgacggagaagaggtttcacgkgactagattattcttggttcacacactatggtatcaaaattaattatggaaaaaaaaacccacattbgattacacacatttttattgagtttgtctgatgatagggvvacatttacaaaggagtaaatgttacgkaacttctcacggtatgtaagttagagctgggcagcaaacatggttaccaagrgtcsktctadttctt

SEQ ID NO: 240 - DNA, 351 bp, Homo sapiens
  misc_feature: n=a,t,g or c
cagtcagbbcattcagctttattncagbgctggtttttggttcsctaagagctgcatgagtgctaggcttcavcacgtgactgggggccccttgggamctgggtactatgggcaggatgcccctgaaaagaactgaagacagaggaatcatacttctctttaatacctvtggggaaggcccaggctaaggatgagggcagggaccagtcccagtgccccctggggagagaagagggagamgcttgggcacaaactcccagtggbcctgcaaggctatcatccctggatcttgctggagtggacagtcttctgggccagggttgttctagcttktttctcactgtacctaat

SEQ ID NO: 241 - DNA, 277 bp, Homo sapiens
  misc_feature: n=a,t,g or c
gagacagagtctcgctctgctgttaatttttgtatttttagtagagatggggtttcaccatgttggtcaggctggtctcgaactcctggcttcatgatccatctggcttggcctcccaaagtgctgggattacaggcgtgancaccgtgaccagctgaaccaagtctttttaaagtaacttctgcccaatcttgggcagagtttctgagcaaatctgtgctggtgagtcgcgaaacagcagccctggctctcttggtggtccggtgtgtggtggggt

SEQ ID NO: 242 - DNA, 270 bp, Homo sapiens
ttttttttttaaggttgttggaaataatttttatttaacagatataaaaaaaattcttaacatttacaaattgtacaaagattggtagcttttatatttttttaaaaatgctatactaagagaaaaaacaaaagaccacaacaatattccaaattataggttgagagaatgtgactatgagaaagtatctaaccaactaaaaaaaatatgaaaccacttttgatgaagcaaaatgaataatgctagattaaaacagtgtgaatcacactt

SEQ ID NO: 243 - DNA, 391 bp, Homo sapiens
  misc_feature: n=a,t,g or c
tttttttttcaaaggacaggacagtggttttatatatggcaaaatacttctcctaggggagtacagacaaatatagacagacagatgggggcacaggacaccagacagggnngncngaagggagggcagtggtgtcttctaatcagtaagtggaagctgcaccccacccccaggtgnagggtgggacattggcacaggaggtggcgagacaggcatgaggtgcccatccctgaggcgggcagcgngncaggccccagtcctttttgggcacantcggctctctctggcccagctgggatgntggggaggggcagggttgctgggctacagggatgccaaggcaaagggntgccccaggggagaggggntaccaaggcctctcctgggggga

SEQ ID NO: 244 - DNA, 177 bp, Homo sapiens
  misc_feature: n=a,t,g or c
ggttgagaagtgtttattgtaaaantggagtttntaatgaaantaaaanattatttcataacattctgataccactacacctgagttcgatgccagcatggtttgaaagtgaagctgatacaagttttctaaaggatgttaaaaaactatagtatgaagantgtantaatatttnag

SEQ ID NO: 245 - DNA, 405 bp, Homo sapiens
  misc_feature: n=a,t,g or c
tnanannatatgttgatgatgttttaatttctagaatattgtatgacatggaactattcagaattcctttaaaaaggaatctgtcttgattaataacattattaaggtactttcaggctttcccttaactccatcgagaaggaagagggagtatgtgagtacatgtgcatgtaatgggtcaggaggaacagaagcaaagaaggaagcacgtgggaaagtgagatgtccataaactgaaaaaccaatttacagaaagggcatctgatgtatttnctaaataagggccttgatcaggggtaaccaatcctctttgtaggcacattctacactgcccataaataaaggggtctctttaaattaacatttccagtattcatggaacagtccggaaatcctcttttcagg

SEQ ID NO: 246 - DNA, 348 bp, Homo sapiens
  misc_feature: n=a,t,g or c
aanttgtattttttgtagagatggggttttaccatgttgggtaggctggtctcaaactcgtgagctcaggtgatccacccgcctcagcctccaaaagtgctgggattacaggtgtgagccaccacacctggccaatgggcatnttctttggttgaattttaaaatattattttttatcatttaccattttctagggcattttaagacccaatttattctgccacaatcatgtcatcagaatagtcaaatgaaatgactttcatttgaattctcactattaagatttaaaattgtggaaaactaaagtggggattggagtagactgttagggattagntcctaggatgg

SEQ ID NO: 247 - DNA, 566 bp, Homo sapiens
  misc_feature: n=a,t,g or c
caagtatatttactctttattgcattccttcatttgcattaaacaatattttttcaatacagttttggacaaaacacaaagacattaagctcatttaacaagagacataagttaacacaatgtgtgctgctttcatgaggaggaaagaggcaagatcttagaggaatccaggatactggccaccaggaatcacaggatctcacaatacaatccacttctttaaaagccacaaaataagctagggaagaaaacccaaaacaaagaagatatgacatccaagtctccaccaaaagtatacaaatggcaagatttgggagatgatctgctttctcacatgaggacaaataacagaggagccacacccaagtgccactgtgggccacaagcctcatgggtggcgtgtgaggtaagcaccttaggatggcttctaattgcttgtccttggcattttaaagcagcagttggggaagagagagggcacactccattaagtctcatcacccaattatgacctaatttaanttccnggctaagtccagtcagttggtaagaccaattcnccctcn

SEQ ID NO: 248 - DNA, 433 bp, Homo sapiens
tcagggctagagaataagtttatacactgcctcgttaggtccaggggcccgcgcacgtggccaggcgggtggtcctgacgcttcaattcatttacaagtattggattccacgcctgctcctgtgcccgcagcttccccaataggccagcaatctcaataatgctttattaaagggcagattcatatgcggctcttgggggaatttttacaaatatcaaaggaactaatccagcatcctatatagaactctgcacactttgggggaggtccgtgaagcaggacaaagtgctctttacacagggaattgagtcggttcaaagtatctgctctgtggggaggacaccctaaagcattctacatacgtcacccctgctctcaggatgcacccagtgggctcgccggtcagggtggccttgcggtgtccacccccaca

SEQ ID NO: 249 - DNA, 450 bp, Homo sapiens
  misc_feature: n=a,t,g or c
ctgagctgcacagtgtatttttctcagcagccaccagaggcacattcaccggtggcgcgtcctggtgggcctccgggtgccgtcaccaggcagcagcgcaccctccctcccgccacagtaggtctgtgcggcctgtccggccccgctgcgtggcgcaggcaattctcccaaacggctccactgggcgcctggtgctgggggcggcagttgaccacgggagggcgggacctcgccggggggcccaggacccctgaacacaagtcctccgagctggaggctactccagaaccacgggtgccgcccaccgcctccagggccgccttgatcttctccgcctcagctttggcgacattggcttttgaattnctggggcanggactccaccagttcttttgcctggacgaagttgatgcctggaatgtaagttctgatttcctgattaagcttcaa

SEQ ID NO: 250 - DNA, 417 bp, Homo sapiens
gttttgttttgtttttgtttttgagatggagtcttgctctgtctcccaggctggagtgcagtggcatgaccttggctcatcacaacctccctgtcgcgggttcaagcgattctcctgttcagcctcccatgttgctgggactgcaggtgcataccaccacccctggctaatttttgtttttgtatttttagtaaagacgaggttgcaccatgttggcccggctggtctcaaactcctgacctcaggtgatccgcctgctttggcctcccaaaagtgctgggattacaggggtgagccaccgcccggcaagttatttaacttcttttgtgcctgagttttttttggctctaaaagtgctacactgaaataaagaatagtgaatataaacctttttcatgataacttacaaataacaag

SEQ ID NO: 251 - DNA, 251 bp, Homo sapiens
gaaacatgattaattttaatgtttatccaccagcagaaaaaatttaatatgtaaatccaccagcagaaaaaaaattaccaaaactaacattttacagatttttagtatcaaagcacaatacatttttcatagaaacaaatatatcaccattataggtaccatgatatggcaatatttatatacaaggtcatttaccatttaaaaaaaaatcagtggcaatggtaatgtaatacattagttcatctttgttc

SEQ ID NO: 252 - DNA, 271 bp, Homo sapiens
  misc_feature: n=a,t,g or c
ttttttttttttaagaataccactatttatttagcatttactatgtaccaggnacagggctaagagctttacatgaaataatcatttaaccctcattcgatcatttaatatctaataaggtagctagatatagacaaggaaatgtgttagtaacttgcccaagatcacaggnggngaaggtagtattcaaaacttcagaccncaagttcttaatgactacagtagatagaaacatggggnaagtacttacaatactttgatttgaaaaaga

SEQ ID NO: 253 - DNA, 354 bp, Homo sapiens
  misc_feature: n=a,t,g or c
gngaacgtcaccggtttaccttcacgtggccattctcctgtccgttcgctttggaaggcncgaggcacagcgnctccccaggcctctccgcggcggcttctcccttcgctgcggtcttggagaactgggcacccatgctggcttcttcaacaaagaaactcaacagatccaagaggggaaaagaagagcctcgggttggtgtaacgacggggcgagcagcaagcagcggcggcggcaacaagcggcagggccacacacaccggagggagggggggttgggggttggtngaaaaggncaagaacagaacccattttaattacacttcccgattaaaaaattttttagttccgagg

SEQ ID NO: 254 - DNA, 295 bp, Homo sapiens
  misc_feature: n=a,t,g or c
ttttttttttttttttttttttttctgagatggttctcgctacgttgcctaggctgtagcgcagaagctatacacaggcatganggcagcacactacagtctccaattcctgggctcaagtggtccttctgcttcacctcctgagtagctgggactacagggacgtgccaccccacctggcatgatacctatttcacagantctgttactatagaaaaacagctctcctactcacttttttcttgtaaaattgtataacattattaggcaaaactgggagantacaanttttaaa

SEQ ID NO: 255 - DNA, 452 bp, Homo sapiens
  misc_feature: n=a,t,g or c
aaaattgagcttttttattagaaagacaacagtacataatttaccccttgctaaaggtattcaataaaaaagtggagatatttttattcccaggtaattgtcacatacagtctttcttctctacttctgcttcattctctttgtgtcactttagtatgtgtacctcctgggtgctctctgtacattttttctcctctatacaagtctgtgccatggcttctgctgtcatttcttctgctttgctcttcaccgggntttcggctgtgcccgtttccttgtctccctttggcttgtaactaccaggggcttctggctccggcttctccgggctcctttcctccctggccgtggggtttctggctggctcccctcctttctttcagaggcctctcttctnggggggtaaggttaagggggtncgggaatttttgtcaggatcaggaagggtccca

SEQ ID NO: 256 - DNA, 230 bp, Homo sapiens
  misc_feature: n=a,t,g or c
tnntattaangggaaagaagagggggagggtagaagaggtgggagcacaaaggcctctgagaaaatgtgtaagcttcctgtggggtcactgagcagggtgggccgggggagcctgaggaagggaagttaggtgactggaaacacaaggggaagaaaagaaaacagaaccagacacccaggccagggtgccaggnaagccactctggggagggccaagagggacgcctttc

SEQ ID NO: 257 - DNA, 223 bp, Homo sapiens
cttaaacacacaggtgtttatttaattgttcatttgattgaatttttaagttcactttactacgtggatgagatgggtgcatattacagtaggctttcgctatgagcgctgccaccatgaggaatatcccagccctcagttctgcttccctttctgagtcccacaaaagccagatgtggacagccttgggttcccatcccagctggctgctccttctggggct

SEQ ID NO: 258 - DNA, 379 bp, Homo sapiens
  misc_feature: n=a,t,g or c
gctcggcgtggggtgtgtgttgatgctgagtttggccacgcatctccctgggttagagactgcacagtgtcctcgccctggactgccacggggactcggtaggctggagagcatcagggttcgtcacgaacaccatgaggtcaaagggcattcctggtttgaagtacttgggtgtcttggtgaagtggatctggtagggagaggtcacgatggggatcccgctgcgctctgcctgcaccatgtcactgcctgagtgcaagatgacggtggcagacacgtacaaagacttccccaccagggcttcttctcgggggttctncancccntccancagtacctttcggctcagcacaaccttccccgagccatnctnaatcgg

SEQ ID NO: 259 - DNA, 5608 bp, Homo sapiens
ctggtatcctggctgctctgcttcatcttcacggtgacagacgtcttccctcccgacagcacaaagtatggcttctatgctcgcacagatgccaggcaaggcgtgcttctggtagccccgtggtttaaggttccatacccatttcagtggggactgcccaccgtgtctgcggccggtgtcatcggcatgctcagtgccgtggtcgccagcatcatcgagtctattggtgactactacgcctgtgcacggctgtcctgtgccccacccccccccatccacgcaataaacaggggaattttcgtggaaggcctctcctgtgttcttgatggcatatttggtactgggaatggctctacttcatccagtcccaacattggagttttgggaattacaaaggtcggcagccgccgcgtgatacagtgcggagcagccctcatgctcgctctgggcatgatcgggaagttcagcgccctctttgcgtcccttccggatcctgtgctgggagccctgttctgcacgctctttggaatgatcacagctgttggcctctctaacctgcagttcattgatttaaattcttcccggaacctctttgtgcttggattttcgatcttctttgggctcgtccttccaagttacctcagacagaaccctctggtcacagggataacaggaatcgatcaagtgttgaacgtccttctcacaactgctatgtttgtagggggctgtgtggcttttatcctggataacaccatcccaggcactccagaggaaagaggaatccggaaatggaagaagggtgtgggcaaagggaacaaatcactcgacggcatggagtcgtacaatttgccatttggcatgaacattataaaaaaatacagatgcttcagctacttacccatcagcccaacctttgtgggctacacatggaaaggcctcaggaagagcgacaacagccggagttcagatgaagactcccaggccacgggatagcctttgctgtgccctgtggcctggccgcagtgaggcatgtatctgtagttccttgctgagtaacaagaagtaaaatacatgtttgtatatctacatttacattctgcgccccagagctaagacagactgcgaatcacttttctgctgtgagggtgatggtgcctgatgcggtgtctcgcctatttccttatttaagcccttaactccttgccctttgagagtgtccattgctggccatggtcactaaatttgaagttccagtcctccctttggagtggacatttaaaatctgcagccattccttgcttcagttcccttccaccacccagggctggctttcctataagccacctccagggtccaggggctttctctctctctccgaagcccctggacctgtttccttgtcatttgaccctcgtctgtgcccgcggagacctcctctgaccaaggggcactagtatgccttgcgctatcatgactgactggcccagtatgattctgttgtcgctgatctcccggaggaggaggctgttgacctgaaaacagtggcgtggctcccctgtgcccagatctggccatgggtgaggcctgcacagatgttgaatgaacatctgtttggggcattggagggaaaaggaaaggaccctgaagccaatatctgattctcggctgcaccttctcttggccaccctggccctgaccgggccagcacgtgcacactggcctcttttcatttcactagtggccgagacaccctctctggcatttatcactgttggccggtgtgatgagtatagagtgccacccaaggcaccagtcacacaagctgatgggcgtcttggctctgccgtcatgtggatgttattgtcgcgcgcgtctataattacaaggttttattcctatttaatgttattgactatagcagattttggaaatcagtgttttccatgtgaccctctttccttgcatccctattccttgtcccccacccactcttccccccatcaagaaaagaaccagcatttgtaaagctgtggacaccatcagggaagcttgttgtaacggcttttgaaggccagtaaccattgttgtggttgtgttttgtattgcttgataccatgaaagtgtaaatactgtaatgcctaatctatttatcaaaactgactactggaccggagcccagaaaccatgggtcaagttacacgtgaatttgttttgtgaagaagggaagctggggcaggtaacacgcagagccgccacgtggaacggtctgtccgccggtctgtcccgcttgccgggcttctgttgcaagtcttggcttaaggagacttcctgtgggttgccatgtcgcacgtccgttagatcttgattttacaggtgagggtggttgccaaaggtgataagaaaagcagccaacaggctccctctcacttaagagagttctaattaataacactaaattcttcctgagaaatgactcctcttggtttggtttgaagtttttcagtgaaggaaaaggcctgagataggaagcagtgccctcgcttcatgaggtggcacatcttcggtggccgttggcctggtcgagctttggtcagctgcgtgggtgcctgtctcctgtctccagcggcagggcatggttcttggcagcctggtgtccacacggtgcattcctgtccccctcggccccaggctggctcagctctccagtgctgcggcgctgtctttgcagcattgccatgtcaccgtagcccccttcactcttggaagtttggggcttcaaggtttattctggcaagaacacctcggagccactgcattgttttgccaaaaacttactgcagattaagtaaagaacttagatgctaaattacatctaattttgtatgtttttttaaatgtgtctttgatgcatactttagaagcacactggctcgcggtttccatccctcttgccttgggacactcttgaggctggcagccctcctgcaatgagttgctctcagttccttctgtttggattttgctcaacatctccagtttctctgctctgaaaaatggggaaaactgctaaacatcccagagatttgcaatcttctagctctccaggtgagcagaaagaccaaatatccaaataaaagcctgaaagccattggtgatccaggggcaccttctcttcagcttgactgggcgtcttccgctgcataacactcaaggtgtctgctctagtcatccagaaacccactcccttctgaagcccctccttgggccgggttgtatcaggaggattcaaccccgctaacatgtggggtgccctctgtaggccttcacacagggaaggaagccctaccctttcaactcctgttggaatgagagtttcctgttctgattccactgtggccaacccaataattctgtccgaggaggggtaagggaataggaggtggggagcaaagagggcagcctgactagatgcccctgctgaatctggtactttctgcacagccttgagtgattggagtcccctaatgactaataaacttgaacatgtaacacacacacacacacacacacacaccattttaggaagtggttctcctactggaaaatatgctacagaatgaaagtttgtaattgaaagaaaaagaatgtattcatctgcttcttgggtttaagcacacacctgaaggggagatattgggggacacggtggccactcgcggtctgtgtcatgacacttcccattcacatcattggcctgcgttgctggggctttgaaccaccaccccgtactttgttttgcctgtagagtgttgtaaaatattttggatgtgaatgtccttgcaggccggttagtctccagtttccacagagaccacctacccaccaccttcccaggtcacctgcctggtccctgaaagaaagcatttgtgtgggcaatcccaacatgaaatgtagacagcgtgaatacggacaggaggtgatgccatattcacagtgggggatggagggcccccacccctgcttcacagaataatgggaagtgactctagtctttgtaagcaattttcattctcattaggaagttaaatgtagattcacagatacatttactttcagaatcctcaagaggatttcaaatgctaacttttagtttcttgggattgatcaaggcaagagaagtggctttaaccatgccagccagaatgaagcatcatgggtcctgatggtttcccgttttcatggtaacaaattcgcacagaggttttgctttatgctgtagaataccgactttcatgatgacaacttggtttatgcatgaatattgcagtatttccatatagcaaaataacatttctacccaggataatagtcacagttttccagggagggaatgatataattttcatgacaatgtcatgtgatgatagaatttctccattgatgaatctctagtatgtgtgtatactttatttacccatacgtatattttatgaccatgagctaagttgttatttctttcattcatatccctgctgaaatattggtactagcaacttaaagttggcaagtctcatcttcagtaatacggatgccatgggagtggccaggccagattgaaggtgaatatggagcagtagcagaagcctcattccagaacccatctggccagagaagcagcagcatcctgggggatggccgtgcatggggtgtacactcgctataggcataggcccggcatggctgtcgctggacgccagctgtgcacacccagccacacctgctgcacgccgcgttagtgtgcggctccgggcctgagcattcgcaaagctcgcttctccagggagcctcctcttggctttggaaaagagcccagggacttaacgtgctgcctgttgtactctgtcccctcatgactttttagacacagggactaggacatcgaccaccctctgcccctcctgcagtcagaacccgagtagtgcaagaacggccacccggttttgccagcgttcagcgtctgcccatggacccataaggcacattagcgttgggggtctcttttcagcagcctcacagacattcccgtcctttctggttggtgttgactgtgtttcagcatcactctaccctcccatgtccttagcattgctgtgcgtgtttccaggcacttaggacacccttccccacgttgccatcttactgacagttcaaatgactctccttttttgttcgttagtaacaatcttcatttgacaccttaatacatttctgactgttcttaaaacagtggggatgcctatattttccttgagtttttgtgactgactttggctatatatacctttctggggttttgtttgttttttatttttattttgattaccgagggtatttggggtggggttgttttttgagatgtgtaattcttttatggagtttttaaaaagaattttcatattgtttttctaacatggcttcattaaacgtttaagtattttaaaaatatgtaatatttggaccagatgttgtgaataatagtagagataaagctattttattctgtatttttaaaactgttccgtacaaataaaagctctcctggacacag

SEQ ID NO: 260 - DNA, 2625 bp, Homo sapiens
cttctcttgcacttgcggatgatgaactggaataacgatgaaagaaagcacatccgatctcaacattcacgtcctgccctataaccgattaattaattgatccccagctagactagtgttggagaaatcagcatgttaaaacaactgttgatgatagctgttggagtaaagttgcagtggaagctatggctgcaaaatcgttaaaatcttcaaggtgaactggcacaaaggttaatctcaagatgccgctagtgaaaagaaacatcgatcctaggcacttgtgccacacagcactgcctagaggcattaagaatgaactggaatgtgtaaccaatatttccttggcaaatataattagacaactaagtagcctaagtaaatatgctgaagatatatttggagaattattcaatgaagcacatagtttttccttcagagtcaactcattgcaagaacgtgtggaccgtttatctgttagtgttacacagcttgatccaaaggaagaagaattgtctttgcaagatataacaatgaggaaagctttccgaagttctacaattcaagaccagcagcttttcgatcgcaagactttgcctattccattacaggagacgtacgatgtttgtgaacagcctccacctctcaatatactcactccttatagagatgatggtaaagaaggtctgaagttttataccaatccttcgtatttctttgatctatggaaagaaaaaatgttgcaagatacagaggataagaggaaggaaaagaggaagcagaagcagaaaaatctagatcgtcctcatgaaccagaaaaagtgccaagagcacctcatgacaggcggcgagaatggcagaagctggcccaaggtccagagctggctgaagatgatgctaatctcttacataagcatattgaagttgctaatggcccagcctctcattttgaaacaagacctcagacatacgtggatcatatggatggatcttactcactttctgccttgccatttagtcagatgagtgagcttctgactagagctgaggaaagggtattagtcagaccacatgaaccacctccacctccaccaatgcatggagcaggagatgcaaaaccgatacccacctgtatcagttctgctacaggtttgatagaaaatcgccctcagtcaccagctacaggcagaacacctgtgtttgtgagccccactcccccacctcctccaccacctcttccatctgccttgtcaacttcctcattaagagcttcaatgacttcaactcctccccctccagtacctcccccacctccacctccagccactgctttgcaagctccagcagtaccaccacctccagctcctcttcagattgcccctggagttcttcacccagctcctcctccaattgcacctcctctagtacagccctctccaccagtagctagagctgccccagtatgtgagactgtaccagttcatccactcccacaaggtgaagttcaggggctgcctccacccccaccaccgcctcctctgcctccacctggcattcgaccatcatcacctgtcacagttacagctcttgctcatcctccctctgggctacatccaactccatctactgccccaggtccccatgttccattaatgcctccatctcctccatcacaagttatacctgcttctgagccaaagcgccatccatcaaccctacctgtaatcagtgatgccaggagtgtgctactggaagcaatacgaaaaggtattcagctacgcaaagtagaagagcagcgtgaacaggaagctaagcatgaacgcattgaaaacgatgttgccaccatcctgtctcgccgtattgctgttgaatatagtgattcggaagatgattcagaatttgatgaagtagattggttggagtaagaaaaatgcattgataaatattacaaaactgaatgcaaatgtcctttgtggtgcttgttccttgaaaatgtttggtcattctagtgttttgctttcttttccttataataaatgacccttttcctccataacttttgatttctaaggaaaatattagcatacatttcaaactaaatgttttacagtggcttatcttttttttccccctgaaaagactaatttggtcaaataaaccactaagtattaagcatggacagctgttgttagagtagcagattcagttttttgatatatcttaattgtgtactttgtgaattttaatttaaagaaagcaactgaaattgaaatcttgagggcagctgtatctactaatgagccttattccatttcctgatgttttaaaagaagaaacactgccttgattatacgaatacactcagaaagtacatttagcttgtagtgttgaattctcttaaaggaatgcttgaattttttcattattgttttattgtttttatatacttgccttatttgaatgtttagcagtatccccttcccacttatatattgtgtgatatgattttgcttgcctataggagttaaaaacttttccatgtgaaatactctgacttaaacatacatgtaacttacataactgttaagaataacagtctgatttaataaatggttcattttaaaagtt

SEQ ID NO: 261 - DNA, 1685 bp, Homo sapiens
gagtagctgctttcggtccgccggacacaccggacagatagacgtgcggacggcccaccaccccagcccgccaactagtcagcctgcgcctggcgcctcccctctccaggtccatccgccatgtggcccctgtggcgcctcgtgtctctgctggccctgagccaggccctgccctttgagcagagaggcttctgggacttcaccctggacgatgggccattcatgatgaacgatgaggaagcttcgggcgctgacacctcaggcgtcctggacccggactctgtcacacccacctacagcgccatgtgtcctttcggctgccactgccacctgcgggtggttcagtgctccgacctgggtctgaagtctgtgcccaaagagatctcccctgacaccacgctgctggacctgcagaacaacgacatctccgagctccgcaaggatgacttcaagggtctccagcacctctacgccctcgtcctggtgaacaacaagatctccaagatccatgagaaggccttcagcccactgcggaagctgcagaagctctacatctccaagaaccacctggtggagatcccgcccaacctacccagctccctggtggagctccgcatccacgacaaccgcatccgcaaggtgcccaagggagtgttcagcgggctccggaacatgaactgcatcgagatgggcgggaacccactggagaacagtggctttgaacctggagccttcgatggcctgaagctcaactacctgcgcatctcagaggccaagctgactggcatccccaaagacctccctgagaccctgaatgaactccacctagaccacaacaaaatccaggccatcgaactggaggacctgcttcgctactccaagctgtacaggctgggcctaggccacaaccagatcaggatgatcgagaacgggagcctgagcttcctgcccaccctccgggagctccacttggacaacaacaagttggccagggtgccctcagggctcccagacctcaagctcctccaggtggtctatctgcactccaacaacatcaccaaagtgggtgtcaacgacttctgtcccatgggcttcggggtgaagcgggcctactacaacggcatcagcctcttcaacaaccccgtgccctactgggaggtgcagccggccactttccgctgcgtcactgaccgcctggccatccagtttggcaactacaaaaagtagaggcagctgcagccaccgcggggcctcagtgggggtctctggggaacacagccagacatcctgatggggaggcagagccaggaagctaagccagggcccagctgcgtccaacccagccccccacctcaggtccctgaccccagctcgatgccccatcaccgcctctccctggctcccaagggtgcaggtgggcgcaaggcccggcccccatcacatgttcccttggcctcagagctgcccctgctctcccaccacagccacccagaggcaccccatgaagcttttttctcgttcactcccaaacccaagtgtccaaagctccagtcctaggagaacagtccctgggtcagcagccaggaggcggtccataagaatggggacagtgggctctgccagggctgccgcacctgtccagaacaacatgttctgttcctcctcctcatgcatttccagccttg

SEQ ID NO: 262 - DNA, 2136 bp, Homo sapiens
gccctggaggcccggcctggccgctcccggccctggggtgcacatcggccctgagtcccgtcccaggctctgggctcgggcagccgccgccaccgctgcccaggacgtcgggcctcctgccttcctcccaggcccccacgttgctggccgcctggccgagtggccgccatgctcctgccttgggccacctctgcccccggcctggcctgggggcctctggtgctgggcctcttcgggctcctggcagcatcgcagccccaggcggtgcctccatatgcgtcggagaaccagacctgcagggaccaggaaaaggaatactatgagccccagcaccgcatctgctgctcccgctgcccgccaggcacctatgtctcagctaaatgtagccgcatccgggacacagtttgtgccacatgtgccgagaattcctacaacgagcactggaactacctgaccatctgccagctgtgccgcccctgtgacccagtgatgggcctcgaggagattgccccctgcacaagcaaacggaagacccagtgccgctgccagccgggaatgttctgtgctgcctgggccctcgagtgtacacactgcgagctactttctgactgcccgcctggcactgaagccgagctcaaagatgaagttgggaagggtaacaaccactgcgtcccctgcaaggcagggcacttccagaatacctcctcccccagcgcccgctgccagccccacaccaggtgtgagaaccaaggtctggtggaggcagctccaggcactgcccagtccgacacaacctgcaaaaatccattagagccactgcccccagagatgtcaggaaccatgctgatgctggccgttctgctgccactggccttctttctgctccttgccaccgtcttctcctgcatctggaagagccacccttctctctgcaggaaactgggatcgctgctcaagaggcgtccgcagggagagggacccaatcctgtagctggaagctgggagcctccgaaggcccatccatacttccctgacttggtacagccactgctacccatttctggagatgtttccccagtatccactgggctccccgcagccccagttttggaggcaggggtgccgcaacagcagagtcctctggacctgaccagggagccgcagttggaacccggggagcagagccaggtggcccacggtaccaatggcattcatgtcaccggcgggtctatgactatcactggcaacatctacatctacaatggaccagtactggggggaccaccgggtcctggagacctcccagctacccccgaacctccataccccattcccgaagagggggaccctggccctcccgggctctctacaccccaccaggaagatggcaaggcttggcacctagcggagacagagcactgtggtgccacaccctctaacaggggcccaaggaaccaatttatcacccatgactgacggagtctgagaaaaggcagaagaaggggggcacaagggcactttctcccttgaggctgccctgcccacgtgggattcacaggggcctgagtagggcccggggaagcagagccctaagggattaaggctcagacacctctgagagcaggtgggcactggctgggtacggtgccctccacaggactctccctactgcctgagcaaacctgaggcctcccggcagacccacccaccccctggggctgctcagcctcaggcacggacagggcacatgataccaactgctgcccactacggcacgccgcaccggagcacggcaccgagggagccgccacacggtcacctgcaaggacgtcacgggcccctctaaaggattcgtggtgctcatccccaagcttcagagaccctttggggttccacacttcacgtggactgaggtagaccctgcatgaagatgaaattatagggaggacgctccttccctcccctcctagaggagaggaaagggagtcattaacaactagggggttgggtaggattcctaggtatggggaagagttttggaaggggaggaaaatggcaagtgtatttatattgtaaccacatgcaaataaaaagaatgggacctaaactcgtgccgctcgtgccgaattcctgcag

SEQ ID NO: 263 - DNA, 1507 bp, Homo sapiens
ggctgccgcacaatcccgggttgtccgggtcctgtcaatgtcacgttctgccattactgcaatagccacatctgtgtgtcacggcccaccctgtcgccagcttcatcatgccctcatgcctcatgggaaaggtggacgttcctcagtcagtgggattgtggccactgtgtttggagcaacaggattcctggggcgatatgttgtcaaccaccttggacgcatggggtcacaggtaatcataccctatcggtgtgataaatatgacatcatgcaccttcgtcccatgggtgacctgggccagcttctgtttctggaatgggacgcgagagataaagattctatccgacgagtagtacaacacagcaatgtggtcatcaatcttattggacgagactgggaaaccaaaaactttgattttgaggatgtttttgtgaagattccccaagcaattgctcaactgtccaaggaagctggagttgaaaaattcattcatgtttcacatctgaatgcgaatattaaaagctcttctagatatttgagaaataaggctgttggagagaaagtagtgagagatgcatttccggaagccattatcgtaaagccgtcggacatctttggaagagaggatagattccttaattcttttgcaagtatgcatcggtttggtcctataccccttggttccttgggctggaagacagttaaacaaccagtatatgtcgtagatgtatccaaaggaattgttaatgcagttaaggatcctgatgccaatgggaaatcctttgctttcgttggtcccagtcggtacctccttttccacctggtgaagtacatctttgctgtggctcacagattgttcctcccattccccttgccgctttttgcctatcgatgggtagcaagagtctttgaaataagcccatttgagccctggataacaagggataaagtggagcggatgcacatcacagacatgaaattgcctcacctgcctggcttagaagaccttggtattcaggcaacaccactggaactcaaggccattgaggtgctgcggcgtcatcgcacttaccgctggctgtctgctgaaattgaggatgtgaagccggccaagaccgtcaacatttagtgcctcctgagcagctcttggttttggcgtcttttgggtcggcccatgtggtttgagcacccagccaggcggtctctttagaggatcctgtacacagttccactattaaaacatttcaggttgaattctgcagtattttcttccttgatttacaaaatgagaaatgtagtcacttagaacttgagcatgatttttgttaaacatatttaataatgatatatatactatttattctctgaaatgccagagagtttgaattttcctatgacaaaccacttctagcatacgttctagaagacaaggaccctttttaatgtcaaagtattgtaaagaccccaagtgatatgtgattgttttttaatttccattaaatgagag

SEQ ID NO: 264 - DNA, 2535 bp, Homo sapiens
ggcccagacgccaaggttgcgggtcatggagtcccgaaccctcctcctgctgttctcgggagccgtggccctgatccagacctgggcagattacaattacaatcaaggcagaaatgatctcatttttacattacaactcctggaaaaggcaatagactgagatgcaagtgtgcccccaagtgatgggcagaaggagagaaggatgttttggatgcattctagaacacaggtaatctaaggagagttgatycaaggcacgtaggaagagtcctccagccactattaggccatcaaaggagtcctcatgtgtcccaggaaatggtcctgctttggtgtccctggtgtgacccatcacccgctggaacagcctgagagaagtagggcctctgcaccaatgctgctgaggatgtcagagcacaggaacgaggccttgggaaattacctggaaatgcgactgaaatcttccttcctgaggggtctgggctcttggaaatcaaaccctctcaggttgggtggctggacgattctcctcacacttacaatgggacaaggggaaccaggaggtccaaggatccctgggttccacacgaactcctcctaccctcattgtgtgacagcagccatgcctcctcctggggatcaggatctattacctgtgcctggagaggaggggactcctcttctcacccgctggtctctggacacatactgtccaattcccctgtggcagctgtaatgtgtagttcaatgggcactcatttgtcccttttaagggtaccctcctttagaatccaggaccttctaccctgcagagtgtggtttggggagagaagtgcaaaatcccacgacaggtgagttgaaggaatgggatatggagccacatccacttccaccccttggtatctggacccacgtgttcttcctactgagattacagaactgtagagatgtctttgatttttaaaatgcaccatgtcctgaaagatggcaccctcccacccgcaggagtgcttcctgcaagctggcgttgagctgtgcctatagaagctcttttcaacattctttatggtccaggagcccttggttggtgcagatggtgataggacccagtgggtcccacagcatggccacactgcacctccttcgctgtcaagtgggtcccccacgaagatactgcacggagagcagtgccaagcctgtggatcaggaatatcaacagcccccagagagtggtgctggctgagggtctgagagcaggacaggaaaacccacctatggaataggtgcctatccctgtgaagatgaacctctggcccttccaggatggaaggagtgcaatgtagtcaactcctcacttagggtctggttggtcacctaaagaaatagagccctaccagggaagatcattgggttcaaatgctgatgagtaggacatttagaggtggcagtgtctggatctaccttggtaggagggagtcagtactgttggacccataggtagcctcatccctgccactgtgtttgctccatttatgtacccacctacccggcctgggctgaccatgggaaggctggctaatttcagtgcttgtgcttggttgttcagggccatttcaggtttgggtgttttctggggatgttaacatgggattcaggctcaactcacaagaaacttttcatctcatgatggatgctgttgggcatgtccaatgtatgacttcatgagttacacagatgctaattcgtaggggcacttggaatcacatggttgttttgtgtcccatggtcaagcattctatcttatcagggcctacagtaacatgccaaaagttgcttccaacatatttctctgctttggatggggcatatttctgtgctgtggatgacatggccttactccagaatcccaggccctccactgtgactctcctactggtgcttggttcagctccaccccaaatcttaccccaccactggcactttcagcaccagggggtctgaaggatggtgactgcgccatggcctggatctgctgcagtgtcctttcctgtggaggctccactcaaagctggcatcctcctatgtcacctagagtgtgggtcaaagcaatacacctacatgtagaatgtgatgtcagaactcaaacaggctcaccaggcagtgtgcttcttccttgcatgaggatgcaagatgcaacagtttgtcttcacattggaaggacacccctggatgcccctaaccactagacctgtaaaacttcactgcagtggccacttctgaatctctgtaaggtttatttatcttcacccctctggagagaagatgttttaccaaagcctctagtgtaccgtcctcctcttactcatccatcccagtcaacatgatgttgtcaatgaaataaaggaatttaatattctatagtatatccaggttctccagatctcttaagactgtactatagaggcctggggaattataatagccctgaggcaaactatgaattaaagtgttgtggatcccacatgaaaaaaaaaa

SEQ ID NO: 265 - DNA, 5911 bp, Homo sapiens
cttgttcctccgccgttgcaatgaactattttctctcagtccggggtggtacttttgagtaaccccttccaaatagaaacccataccagcctatttagctcggtctccactatatgaaggtttcctagggcttggtgtgacgcaacgtatacgaggctcggaaggacaccccgcggaaggatccggtttgttgtggtgtggggaggggagacgctgacaaaccaagatggcggcggcggcgctgaaggccgcggcgtttgggaggtaactgtggtggcgaaggctgcggtagtggggaggcaaccacacagtttggaagaaacggagcgggacgaagaggcggtagcagtagagtcagcctgagactctcagagcacgacggccacacgcccccttaggccctcggcgggcggcggctgcccgcttaggcctagcctccgagcattgcctcggcttcaaacagcggcggcgccatgagtccttaagggcggtccaagcctcccgatccctggcccagacctcgggcccaccatggagccggggtccgacgatttcctaccgccaccggagtgcccggtgttcgagcctagctgggccgagttccgagaccctcttggctacatcgcgaaaatcaggcccatcgcagagaaatcgggcatttgcaagatccgcccacccgcggactggcagccaccctttgctgtggaagtggacaacttcaggtttaccccccgaatccagaggctgaatgagctagaggcccagacgagagtgaaactgaactacttggaccagattgccaaattctgggaaatccagggctcctccttaaagattcccaatgtagaacggcggatcttggacctctacagtctcagcaaaattgtggtggaggaaggtggttatgaagctatctgcaaggaccgtcggtgggctcgggtagcccagcgcctcaactatccaccaggcaaaaatattggctccttgctacgctcccactacgaacgcattgtttatccctatgaaatgtaccagtctggagccaaccttgtgcagtgtaacacacgtccatttgataatgaggagaaggacaaggaatacaaaccccacagcatccccctacgacagtctgtgcagccttccaagttcaacagctatggccggcgggccaagagactgcagcctgatccggaacccacagaggaagacattgagaagaatccagagctgaaaaagctacagatctatggggcaggccccaagatgatgggcctgggcctcatggccaaagacaagactctgcggaagaaagataaggaggggcctgagtgtccccccacagtagtggtgaaggaggagttaggtggggatgtgaaggtggagtcaacatcgcctaagaccttcctggagagcaaggaggagctgagtcacagcccagaaccctgcaccaagatgaccatgaggctacggaggaaccacagcaatgcccagtttattgagtcatatgtctgccggatgtgttctcgaggggatgaggatgacaagctcctgctgtgtgatggctgtgatgacaactaccacatcttctgcctgctgcctcctctgcctgagatccccaagggtgtctggcggtgcccaaagtgtgtcatggcggagtgtaagcggcccccagaagcctttggctttgagcaggctacccgggaatacactctgcagagctttggcgagatggccgactcctttaaagctgactacttcaacatgcccgtgcatatggtgcccacagaacttgtggagaaggagttctggaggctggtaaatagcattgaggaagatgtgactgttgagtatggagctgacatccattccaaagaatttggcagcggtttccctgtcagtgacagtaaacggcacctaacccccgaagaggaggagtatgctaccagtggttggaacctaaatgtgatgccggtgttggaacagtctgtactgtgccacatcaatgcagatatctctggcatgaaggtgccctggctctacgtgggcatggtcttctcagccttttgctggcatattgaggatcactggagttactccattaactacctccactggggtgagccgaagacctggtatggggtgccctcacttgcagcagaacatttggaagaagtgatgaagaagctgacacctgaactatttgatagccagcctgacctcctgcaccaacttgtcaccctcatgaatcccaacaccctcatgtcccatggtgtgccagttgtccgcacaaaccagtgtgcaggagagtttgtcatcaccttcccccgtgcttaccacagcggcttcaaccaaggctacaactttgccgaggctgtcaacttttgcactgctgactggttgcctgctgggcgccagtgcattgagcactaccgccggctccggagatactgcgtcttctcccatgaggagcttatctgcaagatggctgcctgcccagagaagctagacctgaacctggcggcagctgtgcataaggagatgttcatcatggtgcaagaagagcggcgtctacgaaaggccctgctggagaagggtatcacagaggctgagcgagaggctttcgagctgctcccagatgatgagcgccagtgtatcaagtgcaagactacgtgtttcctgtcagccctggcctgctacgactgcccagacggccttgtctgcctttcccacatcaatgatctctgcaagtgctccagtagccggcagtacctgcggtatcggtataccttggatgagcttcctgccatgctgcataagctgaaggttcgggctgagtcctttgacacctgggccaacaaagtgcgagtggccctggaggtggaggatgggcggaagcgcagccttgaagaactgagggcactagagtctgaagcccgtgagcggaggtttcctaatagtgagctgctgcagcaactaaagaactgcctgagtgaggcagaggcttgcgtgtcccgagctctgggactggtcagcggccaggaagctggcccccacagggtggctggtctacagatgaccctgactgagctccgggcctttctggaccagatgaacaacctgccttgcgccatgcaccagattggggatgtcaagggtgttctggaacaggtggaggcctaccaggctgaggctcgtgaggccctggcctcactgccctccagtccagggctactgcagtccctgttggagagggggcggcagctgggggtggaggtgcctgaggcccagcagctccagcggcaggtggaacaggcgcgatggctggatgaggtgaaacgcacactggccccctcagcccgaaggggcaccttggctgtcatgcgaggactgttggtcgcgggtgccagtgtagcccctagccctgctgtggataaagcccaggccgagctgcaggaactgctgaccattgctgaacgctgggaggagaaagcccacctctgcctggaggccaggcagaagcatccaccagccacacttgaggccataatccgtgaagcggaaaacatccctgttcacctgcccaacatccaggctctcaaggaggctcttgctaaggcccgggcctggattgctgatgttgatgagatccaaaatggtgaccactacccctgcctggatgacttggagggcctagtagctgtgggccgggacctacctgtggggctggaggagctgagacagctagagctacaggtactgacagcgcactcctggagggagaaggcctccaagaccttcctcaagaaaaattcttgctacacgctgctggaggttctctgcccatgtgcagatgccggctcagacagcaccaagcgcagccggtggatggagaaggagctggggttgtacaaatctgacacagagctgctggggctgtctgcgcaggacctcagggacccaggctctgtgatcgtggccttcaaggagggggaacagaaggagaaggagggtatcctgcagctgcgtcgcaccaattcggccaagcccagtccactggcatcatcgagcacggcctcctctacaacctctatctgtgtgtgtgggcaggtgctggctggggcgggacgtctgcagtgtgacctgtgtcaggactggttccatgggcggtgtgtgtcagtgcctcgcctcctcagctctccgaggcccaatcccacctcatccccactgctggcctggtgggaatgggacaccaaattcctgtgtccactgtgtatgcgctcaaggcgcccgcgcctggagaccatcctggcactgctggtagccctgcagagactgcctgtgcggctgcccgagggcgaggccctgcagtgcctcacagagagggccatcagctggcaaggccgcgccaggcaggctctggcctctgaagatgtgactgctcttttgggacggctggctgagctccgccaacggctacaggctgaacctagacctgaggagcctcctaactaccctgcagcccctgcttctgaccccctcagagagggcagtggcaaggatatgcctaaggtccagggcttactggagaatggagacagtgtgaccagtcctgagaaggtagccccggaggagggctcaggtaagagagatctggagctgctgtcctcgctgttgccacagttgactggccctgtgttggaactgcctgaggcaacccgggcccccttggaggagctcatgatggagggggacctgctcgaggtgaccctggatgagaaccacagcatatggcagctgctgcaggctggacagcccccagacctggagaggatccgcacacttctggagctggagaaggcagagcgtcacgggagtcgggctcggggccgggccctggagaggcggcggcggcggaaggtggatcggggtggggagggcgatgacccagcccgagaggagctagagccaaagagggtacggagctcagggccagaggctgaggaggtccaggaggaggaagagctggaggaggagactgggggtgagggcccccctgcacccatccccaccactggcagccccagcacccaggagaaccagaatggcttggaaccggcggaagggaccacttcaggcccctcggcccctttctccactctgactccccggctgcatctgccctgcccacagcagccgcctcagcaacagttgtgacagtggctgagcctagcacagaccctgacagagacccccctcggcctcaaggatcctctttctgaccatcaagcctgcttcttggggggtgggcgggtagggggggtggccatccctgctacccgcccacccctgagtcccttgacttttgtattctgactccaaggtattgttcagacctcagctcctgggggccggcccctggagtcttccctccctggtagcctctaaccagcattcccagacacctgaggcagatagatggatgggctggtgggcaggggggtggctggggctgggccatcaccattccagagacaaggccagtgtatatgcaaactgggggactctcctcccttctctccccagttctggtcctggccaggccatgctacactaacccctgcccccactctcctcccctcttttccttccttcctacccccttctccctctcccttcccctgactgttccacccaggaggaggaaacttcacatagccgtgctcacagttttttattttaaaggaatttggctggggagctgaacagggctccctgtgatctgaagaaagcttttggtgcttgtcctcacaaccacctcagtcctccctccctgtcctcccctgtctcctttcctcctcctgggttcatgttgtaataaaagaagattgttggtgtgtaattaatttgttca

SEQ ID NO: 266 - DNA, 1973 bp, Homo sapiens
tcccagggtcccgggttgggggggtggagcagcatttcgtcgccgcgggggtgccgggactccggccgcagtgtcgccgccatcacggacttcctgtgggacaagcgcacgggcctcgccgccagaacgatgccgcatcctcgaaggtaccactcctcagagcgaggcagccgggggagttaccgtgaacactatcggagccgaaagcataagcgacgaagaagtcgctcctggtcaagtagtagtgaccggacacgacggcgtcggcgagaggacagctaccatgtccgttctcgaagcagttatgatgatcgttcgtccgaccggagggtgtatgaccggcgatactgtggcagctacagacgcaacgattatagccgggatcggggagatgcctactatgacacagactatcggcattcctatgaatatcagcgggagaacagcagttaccgcagccagcgcagcagccggaggaagcacagacggcggaggaggcgcagccggacatttagccgctcatcttcgcagcacagcagccggagagccaagagtgtagaggacgacgctgagggccacctcatctaccacgtcggggactggctacaagagcgatatgaaatcgttagcaccttaggagaggggaccttcggccgagttgtacaatgtgttgaccatcgcaggggtggggctcgagttgccctgaagatcattaagaatgtggagaagtacaaggaagcagctcgacttgagatcaacgtgctagagaaaatcaatgagaaagaccctgacaacaagaacctctgtgtccagatgtttgactggtttgactaccatggccacatgtgtatctcctttgagcttctgggccttagcaccttcgatttcctcaaagacaacaactacctgccctaccccatccaccaagtgcgccacatggccttccagctgtgccaggctgtcaagttcctccatgataacaagctgacacatacagacctcaagcctgaaaatattctgtttgtgaattcagactatgagctcacctacaacctagagaagaagcgagatgagcgcagtgtgaagagcacagctgtgcgggtggtagactttggcagtgccacctttgaccatgagcaccatagcaccattgtctccactcgccattaccgagcaccagaagtcatccttgagttgggctggtcacagccttgtgatgtgtggagtataggctgcatcatctttgaatactatgtgggattcaccctcttccagacccatgacaacagagagcatctagccatgatggaaaggatcttgggtcctatcccttcccggatgatccgaaagacaagaaagcagaaatatttttaccggggtcgcctggattgggatgagaacacatcagctgggcgctatgttcgtgagaactgcaaaccgctgcggcggtatctgacctcagaggcagaggaacaccaccagctcttcgatctgattgaaagcatgctagagtatgaaccagctaagcggctgaccttgggtgaagcccttcagcatcctttcttcgcccgccttcgggctgagccgcccaacaagttgtgggactccagtcgggatatcagtcggtgacgatcaggccctgggcccccctgcatcttttatagcagtgggtgtccagtccaggacactggtgcttttttatacaagagaacgagccagagttcactccttcctcctggctctctatatacctgtgaatatgtgaaatagtgtaaatatgaaagaacttgtacctatcacttcaacccctgccttgtacataatactattccatccacacagtttccaccctcacctgccccctcatacggagttggatgggggccgagtgaggtaaccaggtggcatctaccccatgttttataaggaattttgtacagtctttgtgaaataaaataacgtgcttcatttga

SEQ ID NO: 267 - DNA, 4657 bp, Homo sapiens
tttagacagctgtggaggccacaaaagagctccctgttgcttctcaggccctgcctgtggtgggtgtggagtctgtgtaggtctggtgggagacggggtgttctggtcattcctgccaataggcaacaccaggagggtggaagtggaccggccacatcattaaccctgtgcagcctgggcaggtggttttagggaaaccaagctgagggggttggggtgctgagcttgctggcaggaggaaggggtgctttgggtcttagaccccagcctgggggtgacagattctggccctgccttggcatcaggtatcagaagcatgtgcacacgtatcgcattctgcctgatggagaagatttcttggctgtgcagacctcgcagggtgtgcctgtgccccgcttccagaccctgggtgagctcatcggcctgtacgcccagcccaaccagggccttgtgtgcgccctgcctcttcctgtatagggtgagcgagagccggacccaccggatgaccgggatgcctcagatggggaggatgagaagcccccgctgcccccgcgctctggctccaccagcatttctgccccccactgggcccagcagtcccctgccagctcctgagactcccacagctccagctgctgagagtgctcccaatgggctgagcaccgtctcgcacgactacctgaaaggcagctatgggctggacctggaagctgtgaggggtggagccagccacctgccccacctcacccgtaccctcgctacctcatgccggaggctgcacagtgaggtggacaaggtcctgtcaggcctggagatcctgtccaaggtgtttgaccagcagagctcgcccatggtgacccgccttttgcagcagcagaacctgccacagacaggggagcaggaactagagagcctggtgctgaagctgtcagtgctaaaggacttcctgtcaggcatccagaagaaggccctgaaggccctacaggacatgagctccacagcacccccagctccgcagccatccacacgtaaggccaagaccatgcccgtgcaggcctttgaggtgaagctagacgtgaccctgggtgacctgaccaagattgggaagtcacagaagttcacgctgagcgtggatgtggagggtgggcggctggtgctgctgcggagacagcgggactcccaggaggactggaccaccttcacgcacgaccgcatccgccagctcattaagtcccagcgtgtccagaacaagctgggtgttgtgtttgagaaggagaaggaccggactcagcgcaaggacttcatctttgtcagtgcccggaagcgggaggccttctgccagctgttgcagctcatgaagaacaagcactccaagcaggacgagcccgacatgatctcagtcttcataggcacctggaacatgggaagtgtaccacctccaaaaaacgtgacatcctggttcacatcgaagggtctggggaagaccctggacgaggtcacagtgaccataccccatgacatctatgtctttgggacccaggagaactcagtgggcgaccgcgagtggctggacctactgcgcgggggcctcaaggagcttacggatctggattaccgcccgattgccatgcaatcactgtggaatatcaaggtggcagtgctggtcaagccagagcacgagaaccgtatcagccatgtcagtacgtccagtgtgaagactggcatcgccaacaccctggggaacaagggggctgtgggcgtctccttcatgtttaatggcacctcatttggctttgtgaattgtcacctcacctcgggaaatgagaagacggctcggaggaaccaaaactacttggacatcctgcggctgctctcgctgggcgaccggcagctcaatgcctttgacatctctctgcgtttcacacacctcttctggtttggggacctcaactaccgcctggacatggatatccaggagatcctgaactacatcagcaggaaagagtttgagcccctcctcagggtggaccagctcaacctggagcgggagaagcacaaggtcttccttcgattcagtgaggaggagatctccttcccacccacctaccgctatgagcggggttcccgggacacatatgcctggcacaagcagaagccaactggggtccggaccaatgtgccctcatggtgtgaccggattctgtggaaatcctaccctgaaactcacatcatctgcaattcttatggttgcactgatgacatcgtcaccagcgaccattcccccgtgtttgggacatttgaggttggagttacctcccagttcatctccaagaaagggctctcaaagacttcagaccaggcctacattgagtttgagagcatcgaggccattgtgaagacagccagccgcaccaagttcttcatcgagttctactctacctgcctggaggaatacaagaagagctttgagaatgatgcccagagcagtgacaacatcaacttcctcaaagtgcagtggtcttcacgccagctgcccacgctcaaaccaattctggctgatatcgagtacctgcaggaccagcacctcctgctcacagtcaagtccatggatggctatgaatcctatggggagtgtgtggttgcactcaaatccatgatcggcagcacggcccaacagttcctgaccttcctatcccaccgtggcgaggagacaggcaatatcagaggctccatgaaggtgcgggtgcccacggagcgcctgggcacccgtgagcggctctacgagtggatcagcattgataaggatgaggcaggagcaaagagcaaagccccctctgtgtcccgagggagccaggagcccaggtcagggagccgcaagccagccttcacagaggcctcctgcccgctctccaggttatttgaagaaccagagaaaccgccaccaacggggaggcccccagccccaccccgagcagctccccgggaggagcccttgacccccaggttgaagccagagggagctcctgaaccagaaggggtggcggcccccccacccaagaacagcttcaataaccctgcctactacgtccttgaaggggtcccgcaccagctgctgcccccggagccaccctcgcctgccagggcccctgtcccatctgccaccaagaacaaagtggccattacagtgcctgctccacagcttgggcaccaccggcaccctcgtgtgggagaggggagttcttcagatgaggagtctggaggcacactgccccctccagactttccacctccaccactgccggactcagccatcttcctgccccccagcctggatcctttaccagggccagtggtccggggccgtggtggggctgaggcccgtggcccaccacctcccaaggcccatccaaggcctccactgcccccaggcccctcaccagccagcactttcctgggggaagtggccagtggggatgaccggtcctgctcggtgctgcagatggccaagacgctgagcgaggtggactatgcccctgctgggcctgcagcctcagcgctcctcccaggccccctggagctgcagccccccccggggactgccctcggactatggccggcccctcagcttccctccaccccgcatccgggagagcatccaggaagacctggcagaggaggctccgtgcctgcagggcgggcgggccagcgggctgggcgaggcaggcatgagtgcctggctgcgggccatcggcttggagcgctatgaggagggcctggtgcataatggctgggacgacctggagtttctcagtgacatcaccgaggaggacttggaggaggctggggtgcaggacccggctcacaagcgcctccttctggacaccctgcagctcagcaagtgatagcggaggcaccacgaagctgtgaactcagagcccctccctgctaccaaggcccagctatggccccagggttgaaaagttatgagggtcagggcagtatctctctgcctatttattggggtgcctatttattggggatctgcattccccgctgcccaatcatttgcaatgccctaattagggcatcctgcccctcgccttttaggctcaggacggaaggtcagttgccatggttaccgaggaccctggttactctggtgctgtcctgttttactggaccccgcctcccagccccaggggtgcctgtgggggtccatttgggtacgtctgggcccccactttcaccagtttctgcggccttccaccgggcctgaaccacagcggaggagctccgctaagacctccccacccccgctgggggtgggggcgggtgtccgtccggaaatgaaggaatagcccgaggaccgggctggggtttatttaaactgttctgtgtgggtctggggagggagagcaccttaatattattggggttggttggggtggggcaggatctcagccataaagtgccagtttgcttagttctcactgtctcctggtctgtgctgccctgctctggggatgcacggcggcagggtgggggagggaggttcctcgcaggtctcagcccgggacagggtcttgcaagcagcctcctgggcagtcgtaagggttgcggcgtgatgtcttcaataaattaagttttatttggaaaa

SEQ ID NO: 268 - DNA, 2218 bp, Homo sapiens
tcctacaagcagccggcggcgccgccgagtgaggggacgcggcgcggtggggcggcgcggcccgaggaggcggcggaggaggggccgcccgcggcccccggctcactccggcactccgggccgctcggcccccatgcctgcccgaccgcgctgccggagccccaggtgaccagcgccatgtccagccaggtggtgggcattgagcctctctacatcaaggcagagccggccagccctgacagtccaaagggttcctcggagacagagaccgagcctcctgtggccctggcccctggtccagctcccactcgctgcctcccaggccacaaggaagaggaggatggggagggggctgggcctggcgagcagggcggtgggaagctggtgctcagctccctgcccaagcgcctctgcctggtctgtggggacgtggcctccggctaccactatggtgtggcatcctgtgaggcctgcaaagccttcttcaagaggaccatccaggggagcatcgagtacagctgtccggcctccaacgagtgtgagatcaccaagcggagacgcaaggcctgccaggcctgccgcttcaccaagtgcctgcgggtgggcatgctcaaggagggagtgcgcctggaccgcgtccggggtgggcggcagaagtacaagcggcggccggaggtggacccactgcccttcccgggccccttccctgctgggcccctggcagtcgctggaggcccccggaagacagccccagtgaatgcactggtgtctcatctgctggtggttgagcctgagaagctctatgccatgcctgaccccgcaggccctgatgggcacctcccagccgtggctaccctctgtgacctctttgaccgagagattgtggtcaccatcagctgggccaagagcatcccaggcttctcatcgctgtcgctgtctgaccagatgtcagtactgcagagcgtgtggatggaggtgctggtgctgggtgtggcccagcgctcactgccactgcaggatgagctggccttcgctgaggacttagtcctggatgaagagggggcacgggcagctggcctgggggaactgggggctgccctgctgcaactagtgcggcggctgcaggccctgcggctggagcgagaggagtatgttctactaaaggccttggcccttgccaattcagactctgtgcacatcgaagatgccgaggctgtggagcagctgcgagaagctctgcacgaggccctgctggagtatgaagccggccgggctggccccggagggggtgctgagcggcggcgggcgggcaggctgctgctcacgctaccgctcctccgccagacagcgggcaaagtgctggcccatttctatggggtgaagctggagggcaaggtgcccatgcacaagctgttcttggagatgctcgaggccatgatggactgaggcaaggggtgggactggtgggggttctggcaggacctgcctagcatggggtcagccccaagggctggggcggagctggggtctgggcagtgccacagcctgctggcagggccagggcaatgccatcagcccctgggaacaggccccacgccctctcctccccctcctagggggtgtcagaagctgggaacgtgtgtccaggctctgggcacagtgctgccccttgcaagccataacgtgcccccagagtgtagggggccttgcggaagccatagggggctgcacgggatgcgtgggaggcagaaacctatctcagggagggaaggggatggaggccagagtctcccagtgggtgatgcttttgctgctgcttaatcctaccccctcttcaaagcagagtgggacttggagagcaaaggcccatgcccccttcgctcctcctctcatcatttgcattgggcattagtgtccccccttgaagcaataactccaagcagactccagcccctggacccctggggtggccagggcttccccatcagctcccaacgagcctcctcagggggtaggagagcactgcctctatgccctgcagagcaataacactatatttatttttgggtttggccagggaggcgcagggacatggggcaagccagggcccagagcccttggctgtacagagactctattttaatgtatatttgctgcaaagagaaaccgcttttggttttaaacctttaatgagaaaaaaatatataataccgagctc

SEQ ID NO: 269 - DNA, 13500 bp, Homo sapiens
  misc_feature: n=a,t,g or c
aagcttccttcttggaattccaaactaataaatgagctaactccgccccagccccttagtccctccctgcaatccacctacctctgcagacatcttcttccaaggaaccttgcttgggaaacccacaccagacacatccatcatggcgtctacagccgcatgggcgtgcgtccctctgtttatatggccagagccccgcctcgctccgcccctttaaacttggtgggcggaccgaggcggggctcagaccaggccccaccccgatcagccacgtccatcgccctgatttccaggccctcccagtccctgggcgcacgtcccggattcctcccacgagggggcgggctgcggccaaatctcccgccaggtcagcggccgggcgctgattggccccatggcggcggggccggctcgtgattggccagcacgccgtggtttaaagcggtcggcgcgggaccaggggcttactgcgggacggccttggagagtactcgggttcgtgaacttcccggaggcgcaatgagctgcattaacctgcccactgtgctgcccggctcccccagcaagacccgggggcagatccaggtgcgggggccagccctgcgcgtggctggggatgaggtggtcgtggtgatagcctgtgtccaggcatccgcgcagggcgggccctcaaatgacctcaccttctctcctaggtgattctcgggccgatgttctcaggaaaaaggtaatggcttcgcggggctggggtggagctccttcctcttctccggggaccccttgtccctcccctcccctcccctcccctcccctcccctcccctccccttccctccccttcccttccctccccttcccttcccctagaaggaccagcacagcctcctacagctcccgcccggggtgctcctcccttgaattcagtccaggaggaagtctctgccctcttctgcccaggccaagcccctcgtcctgtgtggacgccactccctcctggagctggtgacagctgcttacagcttagctgtcttccccaccaagtcctctgagaaggtggcaaccagttgtgtcccctgtaggccaggcctttttgtacacccctattcaatgtggctgtttccttctaaggccaaggaaacgtagtcgctttctaaaccaaggagtctgaagccgtggagcctctgctctcctgaggtgatagaaccattccctgacccgggtggggctagtgagtttcttgagtaaactacccacgcaccattctttttgttttgtttttgttcttctagaggtaggatcttgctatgttgcccaggctggtctcaaactcctgggctcaagcaattctctcacctcagcctcccaagtagctgggactacaggcgtgcaccccccccgcctccacccagctaattttattttatttttatagagctggggtcttgctatgttgcccaagctggtcttgaactcctggtctcaagcaatcctcctacttcagcatcccaaagtgctgggattacagatgttagccaccatgccctgccccaacattcttttatggccctggggatcacttcagctcaaaccccttgctcaggaagatgtggctcagagttggacttcttggacccagaagcaagtgcttttgacgctgcacacaaagactttctgaaattaatttagaaaagctgtatgccaggtgtggtggcccacgcctttaatcccagcgctttggaaggctgaggtgcgttgatcacttgaggttaggagtttgagaccaccctggtcaacgtggtgaaaccccatctctactgaaaaaaaaaaccaaaaattatctgggcatggtggcagcctcctgtaatcccagctactcgggaggttgaggcaggagaatctcttgaacccggaaggcaggggttgcagtgagctgagatcgctccactgcactctaacctaggcaacagagcgagactccaccccaaaaagaaagaaagaaaaactctgaactctgggaacaactctgggatgaggttactttggaatgcagtcgcaggttccctctacatgtagcctttgcttctgccttccccactacatcttggagaaggttactcctcccacacttcctgggaccacctgagtaccattcctggacctcttccccatagagaattctgacttccaaccctctttgtagggatattataccctgcctgctctgccctgctcttttctggctgtggtgggctcagtctgcataccactagggacaatgaggagccaggcttgttggggaggggtctccttctcccactcctcccgccgtggacctcacctgaccctctctcctcttgcagcacagagttgatgagacgcgtccgtcgcttccagattgctcagtacaagtgcctggtgatcaagtatgccaaagacactcgctacagcagcagcttctgcacacatgaccggtcagtccctgccccctgcagtcctgtccagtggaaaatcacaaggcacaggacacactgttaggactctctttaatggggatggttaatcatttgaacattgaatgattcaaatcagcacactttccaaggtgcttggcaaggtagcgcacactctccactccctgggctggagccagtggttctccactgagggtgattttgccgccagggtccatttgacaatgtttgaagacatttctagttgttgcaactggaggggggaggggatgcttttgggctttaatgtgtagaaatcagggacactgctgctaagggtcctatggtgcagaggacggcccccatgcaagaacgagctggccccaaatgtcaggagcctgccagtgttcagaaactctgccgtagggtttcagcttcacacaggctgcagactggtttggtttggcctgcacgttgatttttgtttaattttttagttgtccgttgttggctggctcccccgtcacctggcagccttcacgcttccctgttttatgtgtagctgtttgagctcgctggacatttccgcctgcaacctcagtttgggagttaaattcacttccttggcagcagatgtgggcccgatgtttctgagcctgagacgctttgcttggtcctctggacttgtccacctgggcacccagtggcaaagccatgctgtgccacacattatagggcttcagcctcagagccctggctgggagctgtatccgagagttgctatggctgtgcagagaacagatccacccggcgtgtggccttcggtgggagctgaggggctcctgaagccagatgctggtggagtggagggtgcttggggcttggagttgcatgtgggaatttaaccgcaccttcgtgaccatgctgtctgatgtaggtcatttacttttccaaatttgcttcctcattcctaagatgcgatgtccacggcacagggtggtgttacacctggtggggacagggaaagcagaggaggtcacttcgttccagctgttggaagtacaacttctggagtcagtcagatccgggattaaatatgagttctgcccgtgtgtcacaagtcatctctaacacgggccacagaggccaaggctgggccagcagcattgatggctcgagaggctgcccttgcaggggccacagctggcctcccacctgccctcactttgtctttctctgtttagggagggaagagggaatttaaaatgcccaaaatactgtttcacacattctttccagaactcgaagtaggattatagcaaggtaataacgaaacaatagttgtaaagtatgtttttttgtttgtttgttgtttgtttttgggacagggtctctctctgtcacccaggctggagtgcagtggctcaatcatagcttactgttacgtgaccccaaacccttgggctcaagtgatcgtcccacctcagccccctgagcaggtgggactacaggcgcacaccaccacacccagttaatttttacatttttttcacacagtgtctcgctgtgttacccaggctggtctcgaactcctgagttcaagtgatcctcccgtcttggcctccccaaagattacgggcatgagctgctgtgtctggccagaatacaggattttaaaaatttatgttttgcaacataattaatataaagacaaatataacccaggcccagttctagttattcattcttctgaattttaaaaggaaacatttggctggcccctaatggtatcatgggccctggtacctgatgaagttggcctagtctgcccccagctcctgaacagtggaagagtttttagtctcattgagctttgtactggacattactaatttctaatccaaagcatcaagtgaagtggcttgtataaataactggttttcctctgggaggctaaggcgggtggatcacttaaaagttaggagtctgagaccagcctggccaacatggtgaaaccccatgtctgctaaaaatacaaaaattagctgggtgtgatggtgtgtggccagtagtcccagctactcttgtggctgaggtgggagaatcgcttgagacccttgagaattgggaggtagagattgcagggagccgagatggcgccactgcactccagcctgggtgacagagcaagactctgtttcataaaaaataaataaataactggttttctggacgagggcctttcccataggtgctaacttctcaaagcccggctgggtgaacactgagcctgctttgcaggtagcaggtggtcacgacagtgccattccctggcccctgcattgtggcttctggcctccctggccctgctcacgctctggctttctcttcccaggaacaccatggaggcgctgcccgcctgcctgctccgagacgtggcccaggaggccctgggcgtggctgtcataggcatcgacgaggggcagtttgtaagttggcttgtcttggcatcactcttcctgccttccgctgtgtcctcccgttttccctcgctgacttggaagttatctganncttttagtaaaataacaaggttaaatagctacaactagtgttggaataccctctgaaggcccctttctagtttccctgtcatagtgtcatagtcttgtaggattcgttttactttttttttttttttttttgagacggagttttgctcttgttgcccaggccggagtacgatggcacaatctcaccgcaaactttgcttcctgggttcaagcaattctctcctgtctcagcctcccgagtagctgggattacaggcatgcgccaccacgcccagctaattttatatttttagtagagatggggtttctccatgttggtcaagctggtctcaaactcccaacctcaggtgatccgccccgccttgaactcccaaagcgctgggattacaggcatgagctaccacacctggccattgtacctttttaaaaatacatatatctatttactggcaagatgcagtgactcacacctgtaatctcagcctgtgggaggccaaggtggacagatcacttgagcccaggagttggagactcacctgggcaacatagtaaaaccccatctctaccaaaaaaaaaaagaaattagccagtcatagcagcgcacacctgtggtccctgctactcaggaggctgaggcagaaggatggagcctgggaggtcgaggctgcagtgagtggtgatagcaccactgcactccagcccgggcgacaaggccagaccctgtctcaaaaaaaaaagggggaggtggggagtaatgtttggtttgcctcatggttccttttgcttgtttcttatacgtttattttcttgttgttgaagtaccttttttagtagtttttgcagccaggaggtatagatgggaagctgccagtctttgtatggaaatctttcttttgtcatctagtttaagctgggcagcaagaggtaggttgatcttgtgtgggtttgggtttttttttttttttgagacggagtcttactctgtcgcccaggctggagtgcaatggtgtgatctcggctcactgcaacctctgccacccggattcaagcgattttcccacctcgcctcccaagtaggtgggattacaggcacccaccatcatgcctggctaatttttgtagagacaagggttcaccatgttggctaggctggtcttgaactcctgacctcaggtgatccacccgccttggcttcccaaagtgttggaattacaggcatgagccgccgtgcccggccttttttatttttattttttttgagatggagtcttgctctgttgccctggctggagtggagtgacgtgatcttagctcacagcaacctccgccttttgggttcaagcagttctgcctcatccttccgggtagctgggatcacaggtgcgtgccacatgcgtamtcatttatgtatttttaatagagatggggtttcaccatgttggccagctggtctggaactcctgacctcaggtgatccgcatgcctcagctcccaaagtgctgggattacaggcgtgaaccacgcctggtcttgatcttgttgctttgaaaagtagcagcgctggtcattgtgtttttgctcagaggaaggccgccatctctctaatgttacctctggtcaggtattctatctgttctctctcagcacaatgtgtgtaggggaagctttgtttcatttatcctgctttatagctggtgtgccttttcatttctggggaaggaatgaagccattatcacttcaggtatttctctcctcatccatctctgaggtgttctgggttccatcttccagagtgtgttttgtttcagtgactatttttacatctgctgctctaattcatcatgctccgttttgtttgacaagttactgttgggttatttttaaatttatgctgttccttccattatgttcctgaaaatcttttcttagacttttccagatttttctatttcctcaggaacatattctgtggttgagtttctgggttattttctgttatcttagttttctttcctctgctttggagattttatttttgttagtttatcacaaagaatgaaactgaaactctctccaaggggtttagcagacttgacctcttaggtacttttagggttgcctcgaagtacacaatgtggtggtttgatataaacataacaggaatttatttctcgctcacagaccccctacgtggttccaggccggttgatggggaggccgcccacgaggcggcttaggtcgccctggctggctgtatacagacacggaggggaagagacgtggcggagcccctgggtgtgaggttttcatgggcctgaccagaagctgcaaacgtcacttctgctgatctttcaaagactagaacctgggcacagggccacctatacgtttagtatacttagtccagttcgttttttgtttgtttttaaaaacagtcttgctctgtggcccaggctggagtgcagtggcgcagtctcggctcactataacctccatgtcccaggttcaagtgattctcccgcctcagcctcctgagtagctgggattacaggcttctgccaccatgcccagctaaccttttgtatttttagtagagacggggtttcatcatgttgaccgggctggtctggaactcctaacctcaggtgatctgcctgcctcagcctcccaaagtgctgggattacagcgtgagccaccacgcctggccacacttagtctagttctataccctggaggaagaataaatgagtttgtttggtgagtgcttcaaggtctctacccgccctgcctcccagcacagagccaggccgctctggcctgaataccctgcccggacgtcacagggcctgtcccctcaaaaggccagtcctgccttcctggttctgttcttgcccaacattctgtatgagtcacagctgcaaattccattcccgtggggaggctgacgggtcccttcccctgtgcggggcatctgccctgtggagttgaggctgccagtgtccgctctgggttcccgaccacccggcagctggcatctcctccccgcttgggtatggccattccgtttctgaccttcagaggtgcgcccctgagcacccccatgcctctgcgtacgtggagacgtcgttgttgctgccccgtgcttgagggactcctggcgagaaagtgagcccaggctgggaatagggctgcagctgttctcttttgctcccaaactgtggcctcagaatgcatccagggattttgcatcagctttggggacatggccctctcagaacaaggaagcttcagctttggcaaggctctccctccttcagacctgccgctgtgagttgttcaatagctctgttctcctggctctgcgtaaaccttgttgacagaggctgacccagacccccgaggcagaaacctttcccttctccttcctcgacatccaaatgccctgagtcaggagccagcgtatgaagtcctgtcccctgttcagcctgtaggagggatttctcggtctacttcctccctggccagcaagtaaaacttgagttcattcagtgagtatttattacaccctacccagacatcagcattctgccctggcctctgtgtgcccttgttctcttcaagaagttccgggtcaccagcctgaccaacatggagaaactccgtctctactaaaaatacaaaaattagccgggcgtggtggcgcactgcctgtaatcccagctacttgggaggctgaggcaggagaatcgcttgaacccggtaggcgaaggttgcagtgagccaagatcgccccattgcactccaagcctgggcaacaacaagagcaaaactcagtctcaaaacaaaacaaaacaaaagaagttcagggtcttcccattgcaagcagttctagatcgaggagaggggttcctagcatgggacccagcagaaggactgtccttcgctccttcattgtctacgtggacagtggatgaagctcagccgaacctgccttgttcccgttttctgggtcagcagggaaagcctttcacagagtagccaccgtgccatcctgaggaaggccctgggtcagaagcttctgtgcttctttgtaccccgggcaagacacacaggtgctcacactgctctgtagaaactgttggcatccaagagagactcacctggaaatctctggaaaacctgaagctcctagctgggggtgctgtgcttcagatgctggtggtgggtgggcacccttgcatcaacagctgcacagtgtgtggtgggcttgcagggtcgcttggcaatagtaggagctctgatttatttttttaaactttttttctggctgggcaggtggctcacacctgtaatcccagcactttggaaggcctaggcgggcggatcacttgaggtcaggagtttgagaccagccaggccaacatggtgaaaccccatctctactaaaaatacaaaaattagccaagcgtggtggcacacacctgtaattccagctacttgggaggcagaggcacaagaattgcttgaacctgggaggcagaggttgcagtgagccaagattatgccactgcactccagcctggatgacagagcgagactctgtctcaaaaaaaatagacaaagccaggcgcagtggctcatgcctgtaatcccaacactttgggaggccgaggtgggtgaatcacgaggtcaggagatcgagaccatcctggctaacacggtgaaaccccgtctctactgaaaatacaaaaaaattagccaggcgtggtggtgggcacctgtagtctcagctactcgggaggctgaggcaggagagtggcgtgaacccaggaggcggagcttgcagtgagctgagatcacgccactgcactccagcctgggcgacagagcgagactccgtctcaaaaaaaaaaaaaaaatagacctttttgtgttttctgttctactacacaagtaatacaggttgagtattccttaacctaaatgcctgggaccagaagtgtttcggatttcaggttttcgaatatttgcatgttcataatataatgagaccttgggaatgagccccaagtgtaaacacaaaatccatttatgttttatagacatcttaggcacatagcctgagagtaattttatgtatttagtaatttgggcgtgagccacagtttttgactgtgacctgtcccatgaggtcaggtgtggaattttccacttgtggtgggcgctcaaaaagtttcagattttggagcctttcaggttagagacatgcaatctataataagtttaatctaggaaaagttagggtctggcacagaggctcacgtctgtgatcccagcactttgggaggctgaggcaggcagatcactggaagtgctggacgggtggggaagtgccgggtgcaagaaccaagctctttgactatggacctcagcctgaggttggtcaagaggtggagtgagtgggggctgaggaccttcatcctgaaaccctgatgcaggagagtctggggtctgccttctaccctcatgtggcgggtgaaggagcaaggttctcaactcaggagggttcttcccctctccattcccacccaggggacatctcacaacaactagaaacaattttgtcgcagctggggggtgggaggtgtgttcctggcatctatctaatgggtgggggcgagggacgcagcccaacaccctacagtgcacaggacacagcgagatccggcctcaaactggcagccatggcagcgtcagccctccagggggcgcgccctggcgcaggtggtgtgccggcccacagctccttgcaggctgggagctgcattttcgtgacatgtcatgagtcctcagagaaaaagagggaacgagtgcatggtggggaggggccctggcgtgctggagtctctgggtttccttctccagagacccctgcagtcagctgagcgcaatcagtcacgttgggctttgcttggatctcactggaatttttcgagccaccccttagtcctcaccttgctaagccctcacgtctcaataacctcaaacctcagtacctgggctgagaaagcctgagtggccctgggagagagaccctgcacccaaggacaaggacatccctgcttcacccaacccaaaggccagtctggacatatgaactcaaccagctaagagtgatatgattgattgatgagaatcaccagagcacttgccagagtttcagcttctccctgggccaaagtgaagtttgctttacacagtaaatgtgctctgtgcaggtcctgaatttagaaggctgtgctgtgtcatcctgctctgtaaatggccagtaggacccccgccccttctcaaggcacattacccgtttaaaacgggggaggcaagagcacaaagcgcccacctattcaccgaagagcatgtatataacttagggccttccatccttaaacaacaggaccttccttgctcttacggaaaaggaaacaggttcagagacgttaattcattgccaaggtcacacagataatgggtccagcgaagagtggtgtccgagcccaaggcagcaggcctttggccactgcagtgttaaacagcacagctggtgtggaagtccggtgctgagtcctgggtacctggactcggagggaagctggctgcagggggaaggggctgcgcagttgtggatgtacctgtcgtctgctggggggcgtgcgggtggacacagtcccccggcctggggagcctcgtgggagaattaagagttactccgggccaaatggccggagttgtcagatctggcagcgtcttcgctggggctccagggagctgctgctggggtggaagctctcacactctttctccacgtgccctttccagttccctgacatcatggagttctgcgaggccatggccaacgccgggaagaccgtaattgtggctgcactggatgggaccttccagaggaaggtaaggcgtctgatccaggtctggagctgggattgaggagggcaagaggcttctggatgggcacagagacaccagctctgggtgaccagggctcagccaccacagggttacggccgagctgctcaggcttggctgagccaagggactccatggtctgtgcagactgcgtgccatctgttgtggcaggtgctttgaattggcaaagggacagagccgggcatggtgctctgggggttgggggaaggactaaggtcagagcaaactctcctggcttcagtacttgtgaatcagagggtttaaaagaaaaacccacctggtaaggtgctgagcgccctctgtctttccatgggagcacagccatttggggccatcctgaacctggtgccgctggccgagagcgtggtgaagctgacggcggtgtgcatggagtgcttccgggaagccgcctataccaagaggctcggcacagagaaggaggtagctccacctgccttccctgcaggccggcggggtgggggtatggctctgcctccttcctgtcctggcccttcacccatcccctgtccctgcggccaggtcgaggtgattgggggagcagacaagtaccactccgtgtgtcggctctgctacttcaagaaggcctcaggccagcctgccgggccggacaacaaagagaactgcccagtgccaggaaagccaggggaagccgtggctgccaggaagctctttgccccacagcagattctgcaatgcagccctgccaactgagggacctgcaagggccgcccgctcccttcctgccactgccgcctactggacgctgccctgcatgctgcccagccactccaggaggaagtcgggaggcgtggagggtgaccacaccttggccttctgggaactctcctttgtgtggctgccccacctgccgcatgctccctcctctcctacccactggtctgcttaaagcttccctctcagctgctgggacgatcgcccaggctggagctggccccgcttggtggcctgggatctggcacactccctctccttggggtgagggacagagccccacgctgttgacatcagcctgcttcttcccctctgcggctttcactgctgagtttctgttctccctgggaagcctgtgccagcacctttgagccttggcccacactgaggcttaggcctctctgcctgggatgggctcccaccctcccctgaggatggcctggattcacgccctcttgtttccttttgggctcaaagcccttcctacctctggtgatggtttccacaggaacaacagcatctttcaccaagatgggtggcaccaaccttgctgggacttggatcccaggggcttatctcttcaagtgtggagagggcagggtccacgcctctgctgtagcttatgaaattaactaattgaaaattcactggttggtggacgcacatttctctttcacctgggtttccctgggtctcatggacagctccaacttgatttggg

SEQ ID NO: 270 - DNA, 2156 bp, Homo sapiens
cgggcccgttgcaagatggcggcggccatgctgggccccggggctgtgtgtgcgcagcgggcggcggcgcggcccggaaggctggcgcggcgacggcgttagcccggccctcggcccctctttgcggccgctccctccgcctattccctccttgctcgagatggatctgcccgtgggccccggcgcggcggggcccagcaacgtcccggccttcctgaccaagctgtggaccctcgtgagcgacccggacaccgacgcgctcatctgctggagcccgagcgggaacagcttccacgtgttcgaccagggccagtttgccaaggaggtgctgcccaagtacttcaagcacaacaacatggccagcttcgtgcggcagctcaacatgtatggcttccggaaagtggtccacatcgagcagggcggcctggtcaagccagagagagacgacacggagttccagcacccatgcttcctgcgtggccaggagcagctccttgagaacatcaagaggaaagtgaccagtgtgtccaccctgaagagtgaagacataaagatccgccaggacagcgtcaccaagctgctgacggacgtgcagctgatgaaggggaagcaggagtgcatggactccaagctcctggccatgaagcatgagaatgaggctctgtggcgggaggtggccagccttcggcagaagcatgcccagcaacagaaagtcgtcaacaagctcattcagttcctgatctcactggtgcagtcaaaccggatcctgggggtgaagagaaagatccccctgatgctgaacgacagtggctcagcacattccatgcccaagtatagccggcagttctccctggagcacgtccacggctcgggcccctactcggccccctccccagcctacagcagctccagcctctacgcccctgatgctgtggccagctctggacccatcatctccgacatcaccgagctggctcctgccagccccatggcctcccccggcgggagcatagacgagaggcccctatccagcagccccctggtgcgtgtcaaggaggagccccccagcccgcctcagagcccccgggtagaggaggcgagtcccgggcgcccatcttccgtggacaccctcttgtccccgaccgccctcattgactccatcctgcgggagagtgaacctgcccccgcctccgtcacagccctcacggacgccaggggccacacggacaccgagggccggcctccctcccccccgcccacctccacccctgaaaagtgcctcagcgtagcctgcctggacaagaatgagctcagtgaccacttggatgctatggactccaacctggataacctgcagaccatgctgagcagccacggcttcagcgtggacaccagtgccctgctggacctgttcagcccctcggtgaccgtgcccgacatgagcctgcctgaccttgacagcagcctggccagtatccaagagctcctgtctccccaggagccccccaggcctcccgaggcagagaacagcagcccggattcagggaagcagctggtgcactacacagcgcagccgctgttcctgctggaccccggctccgtggacaccgggagcaacgacctgccggtgctgtttgagctgggagagggctcctacttctccgaaggggacggcttcgccgaggaccccaccatctccctgctgacaggctcggagcctcccaaagccaaggaccccactgtctcctagaggccccggaggagctgggccagccgcccacccccacccccagtgcagggctggtcttggggaggcagggcagcctcgcggtcttgggcactggtgggtcggccgccatagccccagtaggacaaacgggctcgggtctgggcagcacctctggtcaggagggtcaccctggcctgccagtctgccttcccccaaccccgtgtcctgtggtttggttggggcttcacagccacacctggactgaccctgcaggttgttcatagtcagaattgtattttggatttttacacaactgtcccgttccccgctccacagagatacacagatatatacacacagtggatggacggacaagacaggcagagatctataaacagacaggctctaaaaaaaaaaaaaaaaaaaa

SEQ ID NO: 271 - DNA, 1731 bp, Homo sapiens
atcgtacggatctgaattcggaaaaagaaacaaaaaaagaagaaagaaaaaggcagtgagacagattcagcccaggatcagcctgtgaagatgaactctttgccagcagagaggatccaggaaatacagaaggccattgagctgttctcagtgggtcagggacctgccaaaaccatggaggaggctagcaagcgaagctaccagttctgggatacgcagcccgtccccaagctgggcgaagtggtgaacacccatggccccgtggagcctgacaaggacaatatccgccaggagccctacaccctgccccagggcttcacctgggatgctttggacctgggcgatcgtggtgtgctaaaagaactgtacaccctcctgaatgagaactatgtggaagatgatgacaacatgttccgatttgattattccccggagtttcttttgtgggctctccggccacccggctggctcccccagtggcactgtggggttcgagtggtctcaagtcggaaattggttgggttcattagcgccatcccagcaaacatccatatctatgacacagagaagaagatggtagagatcaacttcctgtgtgtccacaagaagctgcgttccaagagggttgctccagttctgatccgagagatcaccaggcgggttcacctggagggcatcttccaagcagtttacactgccggggtggtactaccaaagcctgttggcacctgcaggtattggcatcggtccctaaacccacggaagctgattgaagtgaagttctcccacctgagcagaaatatgaccatgcagcgcaccatgaagctctaccgactgccagagactcccaagacagctgggctgcgaccaatggaaacaaaggacattccagtagtgcaccagctcctcaccaggtacttgaagcaatttcaccttacgcccgtcatgagccaggaggaggtggagcactggttctacccccaggagaatatcatcgacactttcgtggtggagaacgcaaacggagaggtgacagatttcctgagcttttatacgctgccctccaccatcatgaaccatccaacccacaagagtctcaaagctgcttattctttctacaacgttcacacccagacccctcttctagacctcatgagcgacgcccttgtcctcgccaaaatgaaagggtttgatgtgttcaatgcactggatctcatggagaacaaaaccttcctggagaagctcaagtttggcataggggacggcaacctgcagtattacctttacaattggaaatgccccagcatgggggcagagaaggttggactggtgctacaataaccagtcaccagtgcgattctagataaagccactgaaaattcgaaccaggaaatggaaccccaccactgttggtccaattttcacacacgtgagaatccctggcaaagggagcagaactgaaccggctttaccaaaccgccagcgaacttgacaattgtattgcgatggcgtgggctgcgtgacgtcacctccggtcgtgtctctggtctccgtgttttccagttaattacatcctcatgcagccgtgatcaagggaatgtaactgctgaaaactagctcgtgattggcatataatggagttaacgggtgaataataaaagtatatatatatattatatatataaaaaaaaaaaaaaaaaaaaaaaccgtctacaaagcggccgcagatcc

SEQ ID NO: 272 - DNA, 3505 bp, Homo sapiens
cgccgcctgcccgcccgcccgctcgcccccggtccggactcctcctcctcctcttctcgcattgcagttgaacccagcagcccgccccaccggtggcttttgggggcagaccccggcggctgtggcaggagggcggcggcggcggctgcggtcgaagaaggggacgccgacaagagttgaagtattgataacaccaaggaactctatcacaatttgaaaagataagcaaaagtttgatttccagacactacagaagaagtaaaaatgcgtccaatgcgaatttttgtgaatgatgaccgccatgtgatggcaaagcattcttccgtttatccaacacaagaggagctggaggcagtccagaacatggtgtcccacacggagcgggcgctcaaagctgtgtccgactggatacacgagcaggaaaagggtagcagcgagcaggcagagtccgataacatggatgtgcccccagaggacgacagtaaagaaggggctggggaacagaagacggagcacatgaccagaacctgtcggggagtgatgcgggctgggcctggtggccaaagtgcctcctactcaagggggacttggatctggagctggtgctgctgtgtaaggagaagcccacaaccggccctcctggacaaggtggccgacaacctggccatccagcttgctgctgtaacagaagacaagtacgaaatactgcaatctgtcgacgatgctgcgattgtgataaaaaacacaaaagagcctccattgtccctgaccatccacctgacatcccctgttgtcagagaagaaatggagaaagtattagctggagaaacgctatcagtcaacgaccccccggacgttctggacaggcagaaatgctttgctgccttggcgtccctccgacacgccaagtggttccaggccagagccaacgggctgaagtcttgtgtcattgtgatccgggtcttgagggacctgtgcactcgcgtgcccacctggggtcccctccgaggctggcctctcgagctcctgtgtgagaaatccattggcacggccaacagaccgatgggtgctggcgaggccctgcggagagtgctggagtgcctggcgtcgggcatcgtgatgccagatggttctggcatttatgacccttgtgaaaaagaagccactgatgctattgggcatctagacagacagcaacgggaagatatcacacagagtgcgcagcacgcactgcggctcgccgcgttcggccagctccataaagtcctaggcatggaccctctgccttccaagatgcccaagaaaccaaagaatgaaaacccagtggactacaccgttcagatcccaccaagcaccacctatgccattacgcccatgaaacgcccaatggaggaggacggggaggagaagtcgcccagcaaaaagaagaagaagattcagaagaaagaggagaaggcagagcccccccaggctatgaatgccctgatgcggttgaaccagctgaagccagggctgcagtacaagctggtgtcccagactgggcccgtccatgcccccatctttaccatgtctgtggaggttgatggcaattcattcgaggcctctgggccctccaaaaagacggccaagctgcacgtggccgttaaggtgttacaggacatgggcttgccgacgggtgctgaaggcagggactcgagcaagggggaggactcggctgaggagaccgaggcgaagccagcagtggtggcccctgccccagtggtagaagctgtctccacccctagtgcggcctttccctcagatgccactgccgagaacgtaaaacagcaggggccgatcctgacaaagcacggcaagaacccagtcatggagctgaacgagaagaggcgtgggctcaagtacgagctcatctccgagaccgggggcagccacgacaagcgcttcgtcatggaggtcgaagtggatggacagaagttccaaggtgctggttccaacaaaaaggtggcgaaggcctacgctgctcttgctgccctagaaaagcttttccctgacacccctctctcgcccttgatgccaacaaaaagaagagagccccagtacccgtcagagggggaccgaaatttgctgctaagccacataaccctggcttcggcatgggaggccccatgcacaacgaagtgcccccaccccccaaccttcgagggcggggaagaggcgggacgatccggggacgagggcgcgggcgaggatttggtggcgccaaccatggaggctacatgaatgccggtgctgggtatggaagctatgggtacggaggcaactctgcgacagcaggctacagtcagttctacagcaacggagggcattctgggaatgccagtggcggtggcggcgggggcggtggtggctcctccggctatggctcctactaccaaggtgacaactacaactcaccggtgcccccaaaacacgctgggaagaagcagccgcacgggggccagcagaagccctcctacggctcgggctaccagtcccaccagggccagcagcagtcctacaaccagagcccctacagcaactatggccctccacagggcaagcagaaaggctataaccatggacaaggcagctactcctactcgaactcctacaactctcccgggggcgggcgcggatccgactacaactacgagagcaaattcaactacagtggtagtggaggccgaagcggcgggaacagctacggctcaggcggggcatcctacaacccagggtcacacgggggctacggcggaggttctgggggcggctcctcataccaaggcaaacaaggaggctgctcacagtcgaactacagctcccggggtccggccagaactacagtggccctcccagctcctaccagtcctcacaaggcggctatggcagaaacgcagaccacagcatgaactaccagtacagataagccccgcgcggagatttctaccttctgcacttactccccatcagaagatcgagttttatgcatcacagttaacatgtcagctgcctgcgctccaggcccccgcccccatcccgtccacgttgctgtgtcgtgaggtgcagcgggtcaccctgtggcccgtcctgtgacccatatttagccgtgtttgggactccgtgtcttcaatggtttgttagttgccattacaactttgtctgggtagagtttttgagtttttgcagttcagtatccctctgtctattcacacttcgtgttagtggtaactcagtttgtctttaaatagttacagaagggatacgtcatttgttaatgctttttgttgaagtgagttaaacgagcttttctgtattttaatgctttagtgtttcagttttataagtgaagattttattttaaaaaccagtgggaaagagtggggggtttctttttatgtctgggtcattcaggcagtacatctgaattaagctgaatgtagacaaataaagaaaaacaaaactgaaa

SEQ ID NO: 273 - DNA, 1648 bp, Homo sapiens
gccttttttgcagtctcaggacgggcgctttggagccggccccaggcagcgtgtgtcggtcgcctagtctggagaactagtcctcgactcacggtgagggaatggaccgacacgggtattgtaccgctgagggaaaggagcgggactccggacctccaggagtgcaaggatgatgctgaaaggaataacaaggcttatctctaggatccataagttggaccctgggcgttttttacacatggggacccaggctcgccaaagcattgctgctcacctagataaccaggttccagttgagagtccgagagctatttcccgcaccaatgagaatgacccggccaagcatggggatcagcacgagggtcagcactacaacatctccccccaggatttggagactgtatttccccatggccttcctcctcgctttgtgatgcaggtgaagacattcagtgaagcttgcctgatggtaaggaaaccagccctagaacttctgcattacctgaaaaacaccagttttgcttatccagctatacgatatcttctgtatggagagaagggaacaggaaaaaccctaagtctttgccatgttattcatttctgtgcaaaacaggactggctgatactacatattccagatgctcatctttgggtgaaaaattgtcgggatcttctgcagtccagctacaacaaacagcgctttgatcaacctttagaggcttcaacctggctgaagaatttcaaaactacaaatgagcgcttcctgaaccagataaaagttcaagagaagtatgtctggaataagagagaaagcactgagaaagggagtcctctgggagaagtggttgaacagggcataacacgggtgaggaacgccacagatgcagttggaattgtgctgaaagagctaaagaggcaaagttctttgggtatgtttcacctcctagtggccgtggatggaatcaatgctctttggggaagaaccactctgaaaagagaagataaaagcccgattgcccccgaggaattagcacttgttcacaacttgaggaaaatgatgaaaaatgattggcatggaggcgccattgtgtcggctttgagccagactgggtctctctttaagccccggaaagcctatctgccccaggagttgctgggaaaggaaggatttgatgccctggatccctttattcccatcctggtttccaactatacccaaaggaatttgaaagttgtattcagtattatttggaaaacaattggcttcaacatgagaaagctcctacagaagaagggaaaaaagagctgctgttcctaagtaacgcgaacccctcgctgctggagcggcactgtgcctacctctaagccaagatcacagcatgtgaggaagacagtggacatctgctttatgctggacccagtaagatgaggaagtcgggatgacacaggaagaggagccaggcccttgtacctatgggattggacaggactgcagttggctctggacctgcattaaaatgggtttcactgtgaatgcgtgacaataagatattcccttgttcctaaaactttatatcagtttattggatgtggtttttcacatttaagataattatggctcttttcctaaaaaataaaatatctttct

SEQ ID NO: 274 - DNA, 1584 bp, Homo sapiens
cgggatgcggcgcgccgcgcgttgaacctccttggcctgggcgaagctgtgtggaccaagcaagtcaggagtgtggccatgttttctgagcaggctgcccagagggcccacactctactgtccccaccatcagccaacaatgccacctttgcccgggtgccagtggcaacctacaccaactcctcacaacccttccggctaggagagcgcagctttagccggcagtatgcccacatttatgccacccgcctcatccaaatgagacccttcctggagaaccgggcccagcagcactggggcagtggagtgggagtgaagaagctgtgtgaactgcagcctgaggagaagtgctgtgtggtgggcactctgttcaaggccatgccgctgcagccctccatcctgcgggaggtcagcgaggagcacaacctgctcccccagcctcctcggagtaaatacatacacccagatgacgagctggtcttggaagatgaactgcagcgtatcaaactaaaaggcaccattgacgtgtcaaagctggttacggggactgtcctggctgtgtttggctccgtgagagacgacgggaagtttctggtggaggactattgctttgctgaccttgctccccagaagcccgcacccccacttgacacagataggtttgtgctactggtgtccggcctgggcctgggtggcggtggaggcgagagcctgctgggcacccagctgctggtggatgtggtgacggggcagcttggggacgaaggggagcagtgcagcgccgcccacgtctcccgggttatcctcgctggcaacctcctcagccacagcacccagagcagggattctatcaataaggccaaatacctcaccaagaaaacccaggcagccagcgtggaggctgttaagatgctggatgagatcctcctgcagctgagcgcctcagtgcccgtggacgtgatgccaggcgagtttgatcccaccaattacacgctcccccagcagcccctccacccctgcatgttcccgctggccactgcctactccacgctccagctggtcaccaacccctaccaggccaccattgatggagtcagatttttggggacatcaggacagaacgtgagtgacattttccgatacagcagcatggaggatcacttggagatcctggagtggaccctgcgggtccgtcacatcagccccacagccccggacactctaggttgttaccccttctacaaaactgacccgttcatcttcccagagtgcccgcatgtctacttttgtggcaacacccccagctttggctccaaaatcatccgaggtcctgaggaccagacagtgctgttggtgactgtccctgacttcagtgccacgcagaccgcctgccttgtgaacctgcgcagcctggcctgccagcccatcagcttctcgggcttcggggcagaggacgatgacctgggaggcctggggctgggcccctgactcaaaaaagtggttttgaccagagaggcccagatggaggctgttcattccctgcagtgtcggcattgtaaataaagcctggcacttgctgatgcg

SEQ ID NO: 275 - DNA, 1222 bp, Homo sapiens
ccgaacgcccgcagcagggtcagaagggaggtggccggtctccgtcgtgacctctgacggtttctgagcgttggcctttggcacgcgctacacccttttgctttggttctgccatgccgatgtaccaggtaaagccctatcacgggggcggcgcgcctctccgtgtggagcttcccacctgcatgtaccggctccccaacgtgcacggcaggagctacggcccagcgccgggcgctggccacgtgcaggaagagtctaacctgtctctgcaagctcttgagtcccgccaagatgatattttaaaacgtctgtatgagttgaaagctgcagttgatggcctctccaagatgattcaaacaccagatgcagacttggatgtaaccaacataatccaagcggatgagcccacgactttaaccaccaatgcgctggacttgaattcagtgcttgggaaggattacggggcgctgaaagacatcgtgatcaacgcaaacccggcctcccctcccctctccctgcttgtgctgcacaggctgctctgtgagcacttcagggtcctgtccacggtgcacacgcactcctcggtcaagagcgtgcctgaaaaccttctcaagtgctttggagaacagaataaaaaacagccccgccaagactatcagctgggattcactttaatttggaagaatgtgccgaagacgcagatgaaattcagcatccagacgatgtgccccatcgaaggcgaagggaacattgcacgtttcttgttctctctgtttggccagaagcataatgctgtcaacgcaacccttatagatagctgggtagatattgcgatttttcagttaaaagagggaagcagtaaagaaaaagccgctgttttccgctccatgaactctgctcttgggaagagcccttggctcgctgggaatgaactcaccgtagcagacgtggtgctgtggtctgtactccagcagatcggaggctgcagtgtgacagtgccagccaatgtgcagaggtggatgaggtcttgtgaaaacctggctcctttttaacacggccctcaagctccttaagtgaattgccgtaactgattttaaagggtttagattttaagaatggtgctctttcatgcctattatcagtaaggggacttgtattagagtcagagtctttttatttaggccagttgtcaagtgtcaataaaagcgcatcatgtaattta

SEQ ID NO: 276 - DNA, 1040 bp, Homo sapiens
aacacatttcatctgggcttcttaaatctaaatctttaaaatgactaagttttcttccttttctctgtttttcctaatagttggggcttatatgactcatgtgtgtttcaatatggaaattattggagggaaagaagtgtcacctcattccaggccatttatggcctccatccagtatggcggacatcacgtttgtggaggtgttctgattgatccacagtgggtgctgacagcagcccactgccaatatcggtttaccaaaggccagtctcccactgtggttttaggcgcacactctctctcaaagaatgaggcctccaaacaaacactggagatcaaaaaatttataccattctcaagagttacatcagatcctcaatcaaatgatatcatgctggttaagcttcaaacagccgcaaaactcaataaacatgtcaagatgctccacataagatccaaaacctctcttagatctggaaccaaatgcaaggttactggctggggagccaccgatccagattcattaagaccttctgacaccctgcgagaagtcactgttactgtcctaagtcgaaaactttgcaacagccaaagttactacaacggcgacccttttatcaccaaagacatggtctgtgcaggagatgccaaaggccagaaggattcctgtaagggtgactcagggggccccttgatctgtaaaggtgtcttccacgctatagtctctggaggtcatgaatgtggtgttgccacaaagcctggaatctacaccctgttaaccaagaaataccagacttggatcaaaagcaaccttgtcccgcctcatacaaattaagttacaaataattttattggatgcacttgcttcttttttcctaatatgctcgcaggttagagttgggtgtaagtaaagcagagcacatatggggtccatttttgcacttgtaagtcattttattaaggaatcaagttctttttcacttgtatcactgatgtatttctaccatgctggttttattctaaataaaatttagaagact

SEQ ID NO: 277 - DNA, 1052 bp, Homo sapiens
cgcggaggctgcacggagagcggtgcccgcgtcagtgaccgaaggaagagaccaagatgaatacagagcccgagaggaagtttggcgtggtggtggttggtgttggccgagccggctccgtgcggatgagggacttgcggaatccacacccttcctcagcgttcctgaacctgattggcttcgtgtcgagaagggagctcgggagcattgatggagtccagcagatttctttggaggatgctctttccagccaagaggtggaggtcgcctatatctgcagtgagagctccagccatgaggactacatcaggcagttccttaatgctggcaagcacgtccttgtggaataccccatgacactgtcattggcggccgctcaggaactgtgggagctggctgagcagaaaggaaaagtcttgcacgaggagcatgttgaactcttgatggaggaattcgctttcctgaaaaaagaagtggtggggaaagacctgctgaaagggtcgctcctcttcacagctggcccgttggaagaagagcggtttggcttccctgcattcagcggcatctctcgcctgacctggctggtctccctctttggggagctttctcttgtgtctgccactttggaagagcgaaaggaagatcagtatatgaaaatgacagtgtgtctggagacagagaagaaaagtccactgtcatggattgaagaaaaaggacctggtctaaaacgaaacagatatttaagcttccatttcaagtctgggtccttggagaatgtgccaaatgtaggagtgaataagaacatatttctgaaagatcaaaatatatttgtccagaaactcttgggccagttctctgagaaggaactggctgctgaaaagaaacgcatcctgcactgcctggggcttgcagaagaaatccagaaatattgctgttcaaggaagtaagaggaggaggtgatgtagcacttccaagatggcaccagcatttggttcttctcaagagttgaccattatctctattcttaaaattaaacatgttggggaaacaag

SEQ ID NO: 278 - DNA, 2655 bp, Homo sapiens
cggcgtgcgcggacgggcagccagcagcggaggcgcggcgcagcacacccggggaccatgggctccatgttccggagcgaggaggtggccctggtccagctctttctgcccacagcggctgcctacacctgcgtgagtcggctgggcgagctgggcctcgtggagttcagagacctcaacgcctcggtgagcgccttccagagacgctttgtggttgatgtttggcgctgtgaggagctggagaagaccttcaccttcctgcaggaggaggtgcggcgggctgggctggtcctgcccccgccaaaggggaggctgccggcacccccaccccgggacctgctgcgcatccaggaggagacggagcgcctggcccaggagctgcgggatgtgcggggcaaccagcaggccctgcgggcccagctgcaccagctgcagctccacgccgccgtgctacgccagggccatgaacctcagctggcagccgcccacacagatggggcctcagagaggacgcccctgctccaggcccccggggggccgcaccaggacctgagggtcaactttgtggcaggtgccgtggagccccacaaggcccctgccctagagcgcctgctctggagggcctgccgcggcttcctcattgccagcttcagggagctggagcagccgctggagcaccccgtgacgggcgagccagccacgtggatgaccttcctcatctcctactggggtgagcagatcggacagaagatccgcaagatcacggactgcttccactgccacgtcttcccgtttctgcagcaggaggaggcccgcctcggggccctgcagcagctgcaacagcagagccaggagctgcaggaggtcctcggggagacagagcggttcctgagccaggtgctaggccgggtgctgcagctgctgccgccagggcaggtgcaggtccacaagatgaaggccgtgtacctggccctgaaccagtgcagcgtgagcaccacgcacaagtgcctcattgccgaggcctggtgctctgtgcgagacctgcccgccctgcaggaggccctgcgggacagctcgatggaggagggagtgagtgccgtggctcaccgcatcccctgccgggacatgccccccacactcatccgcaccaaccgcttcacggccagcttccagggcatcgtggatcgctacggcgtgggccgctaccaggaggtcaaccccgctccctacaccatcatcaccttccccttcctgtttgctgtgatgttcggggatgtgggccacgggctgctcatgttcctcttcgccctggccatggtccttgcggagaaccgaccggctgtgaaagccgcgcagaacgagatctggcagactttcttcaggggccgctacctgctcctgcttatgggcctgttctccatctacaccggcttcatctacaacgagtgcttcagtcgcgccaccagcatcttcccctcgggctggagtgtggccgccatggccaaccagtctggctggagtgatgcattcctggcccagcacacgatgcttaccctggatcccaacgtcaccggtgtcttcctgggaccctacccctttggcatcgatcctatttggagcctggctgccaaccacttgagcttcctcaactccttcaagatgaagatgtccgtcatcctgggcgtcgtgcacatggcctttggggtggtcctcggagtcttcaaccacgtgcactttggccagaggcaccggctgctgctggagacgctgccggagctcaccttcctgctgggactcttcggttacctcgtgttcctagtcatctacaagtggctgtgtgtctgggctgccagggccgcctcgcccagcatcctcatccacttcatcaacatgttcctcttctcccacagccccagcaacaggctgctctacccccggcaggaggtggtccaggccacgctggtggtcctggccttggccatggtgcccatcctgctgcttggcacacccctgcacctgctgcaccgccaccgccgccgcctgcggaggaggcccgctgaccgacaggaggaaaacaaggccgggttgctggacctgcctgacgcatctgtgaatggctggagctccgatgaggaaaaggcagggggcctggatgatgaagaggaggccgagctcgtcccctccgaggtgctcatgcaccaggccatccacaccatcgagttctgcctgggctgcgtctccaacaccgcctcctacctgcgcctgtgggccctgagcctggcccacgcccagctgtccgaggttctgtgggccatggtgatgcgcataggcctgggcctgggccgggaggtgggcgtggcggctgtggtgctggtccccatctttgccgcctttgccgtgatgaccgtggctatcctgctggtgatggagggactctcagccttcctgcacgccctgcggctgcactgggtggaattccagaacaagttctactcaggcacgggctacaagctgagtcccttcaccttcgctgccacagatgactagggcccactgcaggtcctgccagacctccttcctgacctctgaggcaggagaggaataaagacggtccgccctggcaaaaaaaaaaaaaaaaaaaaaaaaaaaaaaaaa

SEQ ID NO: 279 - DNA, 8210 bp, Homo sapiens
gcctccacacggctccgtcgggcgccgcgctcttccggcagcggtagctttggagacgccgggaacccgcgttggcgtggttgactagtgcctcgcagcctcagcatgggggaacatggcctggagctggcttccatgatccccgccctgcgggagctgggcagtgccacaccagaggaatataatacagttgtacagaagccaagacaaattctgtgtcaattcattgaccggatacttacagatgtaaatgttgttgctgtagaacttgtaaagaaaactgactctcagccaacctccgtgatgttgcttgatttcatccagcatatcatgaaatcctccccacttatgtttgtaaatgtgagtggaagccatgaggccaaaggcagttgtattgaattcagtaattggatcataacgagacttctgcggattgcagcaactccctcctgtcatttgttacacaagaaaatctgtgaagtcatctgttcattattatttctttttaaaagcaagagtcctgctatttttggggtactcacaaaagaattattacaactttttgaagacttggtttacctccatagaagaaatgtgatgggtcatgctgtggaatggccagtggtcatgagccgatttttaagtcaattagatgaacacatgggatatttacaatcagctcctttgcagttgatgagtatgcaaaatttagaatttattgaagtcactttattaatggttcttactcgtattattgcaattgtgttttttagaaggcaagaactcttactttggcagataggttgtgttctgctagagtatggtagtccaaaaattaaatccctagcaattagctttttaacagaactttttcagcttggaggactaccagcacaaccagctagcacttttttcagctcatttttggaattattaaaacaccttgtagaaatggatactgaccaattgaaactctatgaagagccattatcaaagctgataaagacactatttccctttgaagcagaagcttatagaaatattgaacctgtctatttaaatatgctgctggaaaaactctgtgtcatgtttgaagacggtgtgctcatgcggcttaagtctgatttgctaaaagcagctttgtgccatttactgcagtatttccttaaatttgtgccagctgggtatgaatctgctttacaagtcaggaaggtctatgtgagaaatatttgtaaagctcttttggatgtgcttggaattgaggtagatgcagagtacttgttgggcccactttatgcagctttgaaaatggaaagtatggaaatcattgaggagattcaatgccaaactcaacaggaaaacctcagcagtaatagtgatggaatatcacccaaaaggcgtcgtctcagctcgtctctaaacccttctaaaagagcaccaaaacagactgaggaaattaaacatgtggacatgaaccaaaagagcatattatggagtgcactgaaacagaaagctgaatcccttcagatttcccttgaatacagtggcctaaagaatcctgttattgagatgttagaaggaattgctgttgtcttacaactgactgctctgtgtactgttcattgttctcatcaaaacatgaactgccgtactttcaaggactgtcaacataaatccaagaagaaaccttctgtagtgataacttggatgtcattggatttttacacaaaagtgcttaagagctgtagaagtttgttagaatctgttcagaaactggacctggaggcaaccattgataaggtggtgaaaatttatgatgctttgatttatatgcaagtaaacagttcatttgaagatcatatcctggaagatttatgtggtatgctctcacttccatggatttattcccattctgatgatggctgtttaaagttgaccacatttgccgctaatcttctaacattaagctgtaggatttcagatagctattcaccacaggcacaatcacgatgtgtgtttcttctgactctgtttccaagaagaatattccttgagtggagaacagcagtttacaactgggccctgcagagctcccatgaagtaatccgggctagttgtgttagtggattttttatcttattgcagcagcagaattcttgtaacagagttcccaagattcttatagataaagtcaaagatgattctgacattgtcaagaaagaatttgcttctatacttggtcaacttgtctgtactcttcacggcatgttttatctgacaagttctttaacagaacctttctctgaacacggacatgtggacctcttctgtaggaacttgaaagccacttctcaacatgaatgttcatcttctcaactaaaagcttctgtctgcaagccattccttttcctactgaaaaaaaaaatacctagtccagtaaaacttgctttcatagataatctacatcatctttgtaagcatcttgattttagagaagatgaaacagatgtaaaagcagttcttggaactttattaaatttaatggaagatccagacaaagatgttagagtggcttttagtggaaatatcaagcacatattggaatccttggactctgaagatggatttataaaggagctttttgtcttaagaatgaaggaagcatatacacatgcccaaatatcaagaaataatgagctgaaggataccttgattcttacaacaggggatattggaagggccgcaaaaggagatttggtaccatttgcactcttacacttattgcattgtttgttatccaagtcagcatctgtctctggagcagcatacacagaaattagagctctggttgcagctaaaagtgttaaactgcaaagttttttcagccagtataagaaacccatctgtcagtttttggtagaatcccttcactctagtcagatgacagcacttccgaatactccatgccagaatgctgacgtgcgaaaacaagatgtggctcaccagagagaaatggctttaaatacgttgtctgaaattgccaacgttttcgactttcctgatcttaatcgttttcttactaggacattacaagttctactacctgatcttgctgccaaagcaagccctgcagcttctgctctcattcgaactttaggaaaacaattaaatgtcaatcgtagagagattttaataaacaacttcaaatatattttttctcatttggtctgttcttgttccaaagatgaattagaacgtgcccttcattatctgaagaatgaaacagaaattgaactggggagcctgttgagacaagatttccaaggattgcataatgaattattgctgcgtattggagaacactatcaacaggtttttaatggtttgtcaatacttgcctcatttgcatccagtgatgatccatatcagggcccgagagatatcatatcacctgaactgatggctgattatttacaacccaaattgttgggcattttggctttttttaacatgcagttactgagctctagtgttggcattgaagataagaaaatggccttgaacagtttgatgtctttgatgaagttaatgggacccaaacatgtcagttctgtgagggtgaagatgatgaccacactgagaactggccttcgattcaaggatgattttcctgaattgtgttgcagagcttgggactgctttgttcgctgcctggatcatgcttgtctgggctcccttctcagtcatgtaatagtagctttgttacctcttatacacatccagcctaaagaaactgcagctatcttccactacctcataattgaaaacagggatgctgtgcaagattttcttcatgaaatatattttttacctgatcatccagaattaaaaaagataaaagccgttctccaggaatacagaaaggagacctctgagagcactgatcttcagacaactcttcagctctctatgaaggccattcaacatgaaaatgtcgatgttcgtattcatgctcttacaagcttgaaggaaaccttgtataaaaatcaggaaaaactgataaagtatgcaacagacagtgaaacagtagaacctattatctcacagttggtgacagtgcttttgaaaggttgccaagatgcaaactctcaagctcggttgctctgtggggaatgtttaggggaattgggggcgatagatccaggtcgattagatttctcaacaactgaaactcaaggaaaagattttacatttgtgactggagtagaagattcaagctttgcctatggattattgatggagctaacaagagcttaccttgcgtacgctgataatagccgagctcaagattcagctgcctatgccattcaggagttgctttctatttatgactgtagagagatggagaccaacggcccaggtcaccaattgtggaggagatttcctgagcatgttcgggaaatactagaacctcatctaaataccagatacaagagttctcagaagtcaaccgattggtctggagtaaagaagccaatttacttaagtaaattgggtagtaactttgcagaatggtcagcatcttgggcaggttatcttattacaaaggttcgacatgatcttgccagtaaaattttcacctgctgtagcattatgatgaagcatgatttcaaagtgaccatctatcttcttccacatattctggtgtatgtcttactgggttgtaatcaagaagatcagcaggaggtttatgcagaaattatggcagttctaaagcatgacgatcagcataccataaatacccaagacattgcatctgatctgtgtcaactcagtacacagactgtgttctccatgcttgaccatctcacacagtgggcaaggcacaaatttcaggcactgaaagctgagaaatgtccacacagcaaatcaaacagaaataaggtagactcaatggtatctactgtggattatgaagactatcagagtgtaacccgttttctagacctcataccccaggatactctggcagtagcttcctttcgctccaaagcatacacacgagctgtaatgcactttgaatcatttattacagaaaagaagcaaaatattcaggaacatcttggatttttacagaaattgtatgctgctatgcatgaacctgatggagtggccggagtcagtgcaattagaaaggcagaaccatctctaaaagaacagatccttgaacatgaaagccttggcttgctgagggatgccactgcttgttatgacagggctattcagctagaaccagaccagatcattcattatcatggtgtagtaaagtccatgttaggtcttggtcagctgtctactgttatcactcaggtgaatggagtgcatgctaacaggtccgagtggacagatgaattaaacacgtacagagtggaagcagcttggaaattgtcacagtgggatttggtggaaaactatttggcagcagatggaaaatctacaacatggagtgtcagactgggacagctattattatcagccaaaaaaagagatatcacagctttttatgactcactgaaactagtgagagcagaacaaattgtacctctttcagctgcaagctttgaaagaggctcctaccaacgaggatatgaatatattgtgagattgcacatgttatgtgagttggagcatagcatcaaaccacttttccagcattctccaggtgacagttctcaagaagattctctaaactgggtagctcgactagaaatgacccagaattcctacagagccaaggagcctatcctggctctccggagggctttactaagcctcaacaaaagaccagattacaatgaaatggttggagaatgctggctgcagagtgccagggtagctagaaaggctggtcaccaccagacagcctacaatgctctccttaatgcaggggaatcacgactcgctgaactgtacgtggaaagggcaaagtggctctggtccaagggtgatgttcaccaggcactaattgttcttcaaaaaggtgttgaattatgttttcctgaaaatgaaaccccacctgagggtaagaacatgttaatccatggtcgagctatgctactagtgggccgatttatggaagaaacagctaactttgaaagcaatgcaattatgaaaaaatataaggatgtgaccgcgtgcctgccagaatgggaggatgggcatttttaccttgccaagtactatgacaaattgatgcccatggtcacagacaacaaaatggaaaagcaaggtgatctcatccggtatatagttcttcattttggcagatctctacaatatggaaatcagttcatatatcagtcaatgccacgaatgttaactctatggcttgattatggtacaaaggcatatgaatgggaaaaagctggccgctccgatcgtgtacaaatgaggaatgatttgggtaaaataaacaaggttatcacagagcatacaaactatttagctccatatcaatttttgactgctttttcacaattgatctctcgaatttgtcattctcacgatgaagtttttgttgtcttgatggaaataatagccaaagtatttctagcctatcctcaacaagcaatgtggatgatgacagctgtgtcaaagtcatcttatcccatgcgtgtgaacagatgcaaggaaatcctcaataaagctattcatatgaaaaaatccttagagaagtttgttggagatgcaactcgcctaacagataagcttctagaattgtgcaataaaccggttgatggaagtagttccacattaagcatgagcactcattttaaaatgcttaaaaagctggtagaagaagcaacatttagtgaaatcctcattcctctacaatcagtcatgatacctacacttccatcaattctgggtacccatgctaaccatgctagccatgaaccatttcctggacattgggcctatattgcagggtttgatgatatggtggaaattcttgcttctcttcagaaaccaaagaagatttctttaaaaggctcagatggaaagttctacatcatgatgtgtaagccaaaagatgacctgagaaaggattgtagactaatggaattcaattccttgattaataagtgcttaagaaaagatgcagagtctcgtagaagagaacttcatattcgaacatatgcagttattccactaaatgatgaatgtgggattattgaatgggtgaacaacactgctggtttgagacctattctgaccaaactatataaagaaaagggagtgtatatgacaggaaaagaacttcgccagtgtatgctaccaaagtcagcagctttatctgaaaaactcaaagtattccgagaatttctcctgcccaggcatcctcctatttttcatgagtggtttctgagaacattccctgatcctacatcatggtacagtagtagatcagcttactgccgttccactgcagtaatgtcaatggttggttatattctggggcttggagaccgtcatggtgaaaatattctctttgattctttgactggtgaatgcgtacatgtagatttcaattgtcttttcaataagggagaaacctttgaagttccagaaattgtgccatttcgcctgactcataatatggttaatggaatgggtcctatgggaacagagggtctttttcgaagagcatgtgaagttacaatgaggctgatgcgtgatcagcgagagcctttaatgagtgtcttaaagacttttctacatgatcctcttgtggaatggagtaaaccagtgaaagggcattccaaagcgccactgaatgaaactggagaagttgtcaatgaaaaggccaagacccatgttcttgacattgagcagcgactacaaggtgtaatcaagactcgaaatagagtgacaggactgccgttatctattgaaggacatgtgcattaccttatacaggaagctactgatgaaaacttactatgccagatgtatcttggttggactccatatatgtgaaatgaaattatgtaaaagaatatgttaataatctaaaagtaatgcatttggtatgaatctgtggttgtatctgttcaattctaaagtacaacataaatttacgttctcagcaactgttatttctctctgatcattaattatatgtaaaataatatacattcactcgtgcc

SEQ ID NO: 280 - DNA, 1867 bp, Homo sapiens
gaagctcccaactcgccggcctggccacgggatggcccccaaattcccagactctgtggaggagctccgcgccgccggcaatgagagtttccgcaacggccagtacgccgaggcctccgcgctctacggccgcgcgctgcgggtgctgcaggcgcaaggttcttcagacccagaagaagaaagtgttctctactccaaccgagcagcatgtcactggaagaatggaaactgcagagactgcatcaaagattgcacttcagcactggccttggttcccttcagcattaagcccctgctgcggcgagcatctgcttatgaggctctggagaagtaccctatggcctatgttgactataagactgtgctgcagattgatgataatgtgacgtcagccgtagaaggcatcaacagaatgaccagagctctcatggactcgcttgggcctgagtggcgcctgaagctgccctcattccccttggtgcctgtgtcagctcagaagaggtggaatttcttgccttcggagaaccacaaagagatggctaaaagcaaatccaaagaaaccacagctacaaagaacagagtgccttctgctggggatgtggagaaagccagagttctgaaggaagaaggcaatgagcttgtaaagaagggaaaccataagaaagctattgagaagtacagtgaaagcctcttgtgtagtaacctggaatctgccacgtacagcaacagagcactctgctatttggtcctgaagcagtacacagaagcagtgaaggactgcacagaagccctcaagctggatggaaagaacgtgaaggcattctacagacgggctcaagcccacaaagcactcaaggactataaatccagctttgcagacatcagcaacctcctacagattgagcctaggaatggtcctgcacagaagttgcggcaggaagtgaagcagaacctacactaaaaacccaacagggcaactggaacccctgcctgaccttacccagagaagccatgggccacctgctctgtgcccgctcctgaaacccagcatgccccaagtgagctctgaagccccctcctcaatcccttgatggcctcccaccctgtaagaggctttgcttgttcaaattaaactcagtgtagtcaaacacagacatggttgttgcaccagaaaggtccccactagagctaagcgtgaagctgaagctctgtccctattcccccagcccagctagctgatcacaccaacagatcctcatcagcaaagcatttggctttgtcctgcccaagtgggctgcagactgagtgctgcccttgtagcttccccagaccccaactcactgcagttcatctgaacaacctgagctcctgggccggggtggaaggagggggataaacctaaggccctgatccaaagcagcctgttgagctggttctccagggctgcagtctctccaggtgtacagctgtccctgccctgtcctgtccttgcacagtctcctatgtctgagccccagtgccttctgttcgggccctcctttggtgggaaaggcagagccctgacccttgaatggttgtccttgactctgtgctgctgccttctgcagagaggcacctaagctgtttaaagagcccagtgattgtggctgctcctcctagaggtgggagggggcaagaggcctccttggtcagtgtccatgctttctgggcagggacttggttttttgttccaacagtggccttctccgggcttcatagttctttgtaatatgttgaagttaatttgaattgactgattttgttgaactgtgtgtttaagctgttgcattaaaaagctttcttctacatcaaaaaaaaaaaaaaaaaa

SEQ ID NO: 281 - DNA, 167343 bp, Homo sapiens
atctaccatgatcaagtgggcttcatccctgggatgcaaggctggttcaatatacgcaaatcaagaaatgtaatccagcatataaacagaaccaaagacaaaaaccacatgattatctcaatagatgcagaaaaggcctttgacaaaattcaacaacccttcatgctaaaaactctcaataaattaggcattgatgggacgtatctcaaaataataagagctatctatgacaaacccacagccaatatcatactgaatgggcaaaaactggaagcattccctttgaaaactggcacaagacagggatgccctctctcaccactcctattcaacatagtgttggaagttctggccagggcaattaggcaggagaaggaaataaagggtattcaattaggaaaagaggaagtcaaattgtccctgtttgcagacgacatgattgtatatctagaaaaccccattgtctcagcccaaaatctccttaagctgataagcaacttcagcaaagtctcaggatacaaaatcaatgtacaaaaatcacaagcattcttatacaccaataacagacaaacagccaaatcatgagtgaactcccattcacaattgcttcaaagagaataaaatacctaggaatccaacttacaagggatgtgaaggacctcttcaaggagaactacaaacaactgctcaatgaaataaaagagggtacaaacaaatggaagaacattccatgctcatgggtaggaagaatcagtatcgttaaaatggccacactgcccaaggtaatttatagattcaatgccatccccatcaagctaccaatgactttcttcacagaattggaaaaaactactttaaagttcatatggaaccaaaaaagagcccacatcaccaagtcagtcctaagccaaaagaacaaagctggaggcatcacgctacctgacttcaaactatactgcaaggctacagtaaccaaaacagcatgttactggtaccaaaacagagatatagatcaatggaacacaacagagccctcagaaataacgccacatatctacaactatctgatctttgacaaacctgagaaaaacaagcaatggggaaaggattccctatttaataaatggtgctgggaaaactggctagccatatggagaaagctgaaactggatcccttccttacaccttatataaaaattaattcaagatggattaaagacttaaacgttagacctaaaaccataaaaaccctagaagaaaacctaggcattaccattcaggacataggcatgggcaaggacttcatgtctaaaacaccaaaagcaatggcaayaaaagccaaaattgacaaatgggatctaattaaactaaagagcttctgcacagcaaaagaaactaccatcagagtgaacaggcaacctacaaaatgggagaaaattttcgcaacctactcatctgacaaagggctaatatccagaatctacaatgaactcaaacaartttacaagaaaaaaacaaacaaccccatcaaaaagtgggcaaaggacatgaacagacacttctcaaaagaagacatttatgcagccaaaaaacacatgaaaaaatgctcaccatcactggccatcagagaaatgcaaatgaaaacyacaatgagataccayctyacaccagttagaatggcaatcattaaaaagtcaggaaacaacaggtgctggagaggatgtggagaaataggaacacttttacactgttggtgggactgtaaactagttcaaccattgtggaagtcagtgtggcgattcctcagggatctagaactagaaataccatttgacccagccatcccattactgggtatatacccaaaggactataartcatgctgctataargacacatgcacacgtatgtttattscggcactattcacaatagcaaagacttggaaccaacccaaatgtccaacaatgatagactggattaagaaaatgtgkcacatatacaccatggaatactatgcagccataaaaaatgatgarttcatgtcctttgtagggacatggacgaaattggaaatcatcattcacagtaaactatcgcaagaacaaaaaaaccaaacaccgcatattctcactcataggtgggaattgaacaatgagaacatatggacacaggaaggggaacatcacactctggggactgttgtgggtkgggggaggggggmgggacagctttaggggacatacctaatgctaaatgacgagttaatgggtgcagcacaccagcatggcacatgtatacatatgtaactaacctgcacattgtgcacatgtaccctaaaacttaaagtataataataataaaatttttaaaaaaggaaaaaaaaaagaaagtcagttttgctagatatatagtccttggcatgcattttctttctttgagtatcttaaatatgttctcatatttttttctaatattaaacattgctattaaaaacactgataaaatctaattttctttccttgtaagtcacttgttcttttcctagatcccaaaggtttgcttgtagtctaaatattttccagaatatgtctgttgttcattgttctgggtcagtattctcaagtgtacactgtgttcttttagtgtgtagtttcgtgtctcttcattttagcaattatagtatttagtaattgaatattatgagtgttaattattattctcacttggttttctgtgatgccacataagattcccttatgtggcatcttgcttatctgtcttcaacatttgttaggttcttttgaattgtttaaatctcttcatttctttttggtattttttattaatctactcttgtgtttctattacaggttgagtgtcccttatgtgaaatacttgggaccaaagtgtttcagacttcagactttttccgattttggaatattgctgattgagcatcccaaatccaaaatccaaagtaatccagtgagcatttcctttaagcgtcatgtttgcctcaaaaagctgcagattttagaccatttctgacttcaggttttcagatttgggatggtcaacatgtagtttagtcttcatttccaaaatgatgttttcttttatttctaattctttattgagttttgtcacctcatttataagctttgctggtttttcatgtatgtacctctttcatgtttgtataacttttaaatctttttagcttatttgaaattctggtgtattgttggcatgctttcactctctatatgacattgtatttctaatttgtaacagctctttttattctcttaatcttttattttgtagcaatctcttctcatttcttagctatactatcttatttttctaacgatagtaaggacaagctgttcttaaagttttcttctacctgcctaatttatttcttctaatttccctgcctgctcctctgcccccacttgaggcctttattattttagagacttttctcaaatttatggtagtccttggctattggctcatgtttaagagttgaacgattaaaaaaactaattagaaagtctatgtgccatgggtagggcttgttcacttccacactttaccataaagtaatctgattgagctgtttctttgtggaatcctctgcgttagaatcttttcattaattttttttctttgaggctgatcggattcttcagagaagattctttcagccccctaccctgaggggaataagcttactcatagtgctttggcagccaaatgaggagaggaacattgttcctctgtaaatttttgtttaggaaggctgtctcagttgatggtttcccgtagtccagactttcatttttactccctccagagaacaacctctggtagcatacctgagaggagaagggacatctgctgagctatatggaaggaatgaggagatctggaaggttctaagtatctcgtctcttttttcaacagttcctcttgtttttaggttgattcaacttcctgatacacctgttgttttcagttgccatattttttgtgggttctgcagtagaaattaaacgtttgcattgaactttcctgggcctatgaagtcagttatcatttgtctgtctactttctaaaatgccttgctattgtctcttctctcattctctttgtcttaagggtgtgtgtgtgagagtgtgtgtgtgtgtgtgtgtgtgtgtgtgtgtgtgtgtgtgagaagccctgttcagtgttgtttcaggagagagaggagaggctaatggcatgcattcatttcaccccagtacttggacctgtattgtacagtgaatgtcagggaagttactcttcaggtctcctgattcttttggagcaaatgataaaacgtttttctgttgacacattttgggcgacatagcaagaccatgtctctattttttttttttttttaaaaaaagaaatggctgagcacggtggctcatgcctgtaatcccagcactttgggaggccgagttgggcctatcacaaggtcaggagattgagaccatcatggccaacatggtgaaaccccatctctactaaaaatacaaaaattagccgggcatggtggtgggcgcctgtaatcccagctacttaggaggctgaggcaggagattcgcttgaacccgggaggtggaggttgcagtgagccgagatggcgccatagcactccagcctggtgacacagtgagactctgtctcaaaaaaagtaaaaataaaaacagagaaatggtcataaaggaatcctatgaacaattatatgccagtaaattaaaccatttggatcaaatggacaaattactagaaaggaatgctgtagaacatgaagaaatgttcacctggtagttgacattgtgatccatttgcaggctgttaccttctcctctcaaggatgcagtggaagtctcaacctggagaagatgctatacaatgcaagaggtgaactctgcccttagtaaaatccagctggtgggatattctcagaaaattgtgagtattcatattacatttcagttattcatgaatgctttccattcatattgttgtttgttgtttggaagaatcctatagttacgtttttaaagccattccattgctgaggatccagagcctctgttctttcctccgttccgcgcaggattttattggtgctctttccccaccctcacatctccatcaccagccagcattcgattggccagcgtgcagggagtccggagaaaggcgtctcatcctgttcacattagattttatagattttggatgggtgaaacgggaagagagaagagtttgtcaagtgtgacttttgagctctgacctaaatgataagccttcccatttcttactgtcatcctgtgcccagagctactcagtaccgaacaacaagggcctaacacctaactgaaaatgaaaaaggaaagccaaagtgtgtgagtctttggtctgtttggtaatatttcatctctcccttttaatgtgtgaaccttgagtgcctggggacatggaagagagctgaagctctcaggtgacaagtaaatattataggattgctttctttgtctgccagttgatctgcatcatctttctgttttccttaaaactttctagtttactttattgattgattgactgagacaaggtcccactttgttacccaggctggagcgcagtggtacaaacatggctcactgcagcctcaacttcccgggctccagtgatcctcctgccccaagtagctgcttgaggactacaggcatgtgccaccatgcccagctaatttttgtatttttttgtagagacagggtttcaccatgttgcccaggctggtcttgaactcctggcctcagcctcccaaagtgctgggattacaggcgtgagccattgcacccagtctctggtttactttaaaataatttttgtttttaaactgaggatatttctgttgtttttccctgcagaattacctcatgtgactgtcactgtaagctcattgcacattcttactgtggttctcttttaggagctttttggtgcggtccaggtgactcctctgagctctggctatgcccttgggagctccaactggatcatccagtctcattacgagaaagtgtcttatgtctctggatcctccttgcttaccacacacccccaggtaattccaaattctcttctagcaactcagctttttggttacttaagtcaaattcagaatgtatccaaggaaccatcagccatttttaaatcttccaaatatggttttctacagatactctctagccaaggtagactatttgagtctcaacattttgacctacaggtttctctgaaatagtcctgctaccttgagggtcactcctaggattctgaaatcccccaggccttccaaagaccatagcctgatgtgggacacagatggttatgcatttactcagcaaatattaactgtttaaaatccttcccaagggccaagtgtcaagtgtcatgcacacatctgggtattggggattcagtggtgaccaacgggcaaagcatgtgcccgtagatcttatgttgtaggggagttgatgatgttggggagaggatggtgtatagtaggtaaacaaataaagtgcctggtcatttccgattgagatacaagtactgaaaacagtaaagcagggtgattttcagaatgatggccattggtttagattgggtgcccaggaaagccaatgggaagatctcacttgaactgagacctggagagataaaccatgtcggctgggcgcggtggctcatacctgtaatcccatcattttgggaggccgaaatgggataactgcttgagcctaggagttcaggaccggcctgggcaatatggcaaaactctgtctctacaaaaaatacaaaaattacccgggtgtggtggcacacgctgtggtcccagctactcaggaagctaaggcagaaggatcgcttgagcctgggaagcggaggttgcagtcagccgagattgcgccaccgcactccagtgcgggtaacagagtgagattatgcctcaagaaaaaaaaaaaaaggccgggtatggtggctcatgcctgtaatcccagcactttgggaagccaaggcgagtggatcactttaggtcaggagttcaagaccaacctggccaacatggtgaaaccccatctctactaaaaatacaaaaattaggtgtgatggtgtgcacctataatcccagctacttgggaggctgaggcgggagaatcacttgaactcgggagacagaggttgcagtgagctgagatcatgctgctgtacccagcctgggtgacagagtgagactccatctcaacaaaaaaaaaaaaaaagagagagaaagaaaaaagaaaaacagagaaattagccacgtaaagccgtgagtgtttgtattacaaagggatggccagtgaagggcccctaaagtaagaataagctgggcatgtttgaagggcagagaaggctattgtggtcacagcgtggaggtcagcagtgaggtccaagagagtggcagacaccatgtcatgtagtgttagcaggctgtgaggaggaattttggttttattttaatatggagagggaaactattggaacgttttaagttattcattccagtcatatttggcaagaagcctagcacatataaacattgttatgaatgtgatacttactcctttttggtatttgtaaataatttactgttcatttcctgaatgttggttatttctatgtttgtaatagggagtggggggacattagttagctgttgaatgggtatatagatacattaggtaacttgtggaagtccatattacatttgtttatctacatctatttacggagagagagagagagagagaaggtcttgttctgtcacccggactggagtacagtggtgtagtcatagctcactgtaatctcaaactcctgggctcaagcaatcctcccaagtagctaggactatagccaccacacctggcctatttattttttaacataacctcaaatttttattgtcttcataataaaaccaaaaatgaagctaagaactggatcacttggccttttctccttttatcccttcccagttaaaaatacttgtatctcttagtagccagcattctcctagatctgcagttgggcccaacacttaagctttagcacaatctcgtttgtagttttagcctttttccagaagattggcttggtctgcctacatagccaccccttcctgccattaagccactttcccttggcatacagatcatcttttcccttcttgtaccatgtcactctgtggggttggtgccaaccatgcttcttacacaaagtccagtgggtttgaagaacattcaccatgttagagcactatcagtaaagaaagaaagaaattattcattttttaattacaaataaaaattgtatatatttatggtatgcatgatgtcttgatatgtgcatgcattatggaatggctaagtcaataattaacagaccccattttaatacagggagaaccatgctgtgctctagtgttgaacaataggatgtctgagctgccattctgtattatttctttataccttcttttatagccaagtttcatctcaagatctagaggggacgttgctattttttcctgcatctggcggaattctgggcccttcctggttattgaaatcaaaagcccatcaatgtcaccatcatctgcttcattgaatcaaaattttttattggcagcttctatcgttcctgatatgttcttccataaaagacagaaagatgacttggttgccaactctcgcgatttgtcctgcttagttcaaagcctttacagtactattgatgtaatttccagtaaattattcttacaaggtccataaatttaaagggaaaataatgtcttgaaagtaatgagcaacatacctaagtaattaattttaatttttagctggcaacctgtgttatatgtaaaaaagaaaaaaattagatttttctctacccacgtaattggattgtgtattgaattggcagggatgagaaaagttttggtttgaaaaacttgatagactaatgcagatgttagcaaactgtggcctgggcactaaatgtagcatgccacctattttggcatataatattttgttgaagtacagccacacccacttgtttatggaatgtttatggctgaatatacaccgtaggctggacaaggtggctcatgcctgtaatcacagcattttgggaggccaaggcaagatgattgcttgagcccaggaattggagaccagcctgggcaacatggcaagatcccatctctacgaaaagttaaaataaaataaaaaaaagccaggtgcggtggcatgcgcctgtggtcccagctactcgggaggctgaggcatgaggatttcttcagcctgggaggttgaggctgcagtgagccatgtttgtgccattgtactctagcctgggcaacagagcaagaccctgtctcaaaaaaaaaaaaaaagttataatggcagaattctactttaaatgttagagcaaactttgctaacccctggtctacttgagtacaatctttactaactaggaagaatatcacaggctgctgtagaattctgataaacatggggaaataaggctttggattaagcctgaggcagtaagaatggagaaaagagttaaaacattggcgggtctttaatgcaagaaacatttgttgaatgcccactgtcttcagaaaagaaagaataaaagttacagatcttatgtctgcatgacattgagaatggtgttaatggccattccagttaacaaggaagagttggcagagggacatttgttgcagaagagggtagtaggtttcatgaatgtgaatttgagagaacattagacagatgtaaatatggggctggaactgggatgtggaggcaagtctggagacaaactggagagttgtcacgttttaaaaatctaaccgggcacggtggcacacacctgtaatcctagcactttgggagaccaaggcaggcagatcacaaggtcaggagttcaagaccccaacatggtgaaaccccatctctactaaaaatacaaaaattaaccggtgtgatggtgctcacctgtaatcccaaatactcgggaggctgaggcaggagaatcgcttgaacccaggaggtggaggttgcagtgagccgagatcgcactattacacttcagccagggcaacagagagagactccgtctcaaaaaaaaaaaaaaaatctaaataaagggctgagggccaaagactgatccatagggaacttttaccaacagacagtggaagaaagaaaaatagtcttgtgtaagaatggatggagagttaaaggaaaattgaggccaaagagtgcaacctcccaaagggagaaggaagagaactagcctttactgagcatgaggtctcagtattaattttttaattgacttgatatttagcaaccatgctgaattctcttaattctaataatctattgatattatcttgccaaagaagtaacagttttctcacctctcttctaacctttgtatcttttatttttcttatcttgtgactgagccctataatactacgttgcacagcaatgatgatagtggacatccttgtcttgtataaggctgtaaaaggaaagcttttgtagtttcttcgttaaacatcacgcttactgcaccatgtttatttgtcaagttaaggagtgtctcctttatccccaactttctgattttttaaaagtcagatataagtgttataccttatcaaatgcttttgagcatgtgagatcaactttgatttctctcctttgagaccattaatgtagtgaactgcagtgttagcttttctcacatttaaccatccaatattcctgggataaatcttgcttgattacaatctattctttttaaaatactctccaggaatgagttggtgaatattttattgaagtttataatctatagtcataggtgaaaaatgggcccatacattattttcttgtactacctttgtttgttggaagccaaggtgtattagtctcataaggtgatttgggagcctttccctctttttctaatgtcagaaaaaagtatatgagatagggattatcttttcctgaaagtttggtcaaatgttccataaaactgtctggacctggattaccattattgaactatattttctgggccaaaattgtgccagaattttggcagagatttgtcctttttgcttaggttttcaaaatcataggcatagagctatttataatcctcttttatttgtttaaccttttttgtgtaagtctgttttcattctaaattttattttcatcatcatcttgatcagacttgctagaagtttgtctgtattattgattttattcaaaaaataagtttttgcttttaatcgttttggttgtattttcatcctttgttctgccctttatctccttccttccttctttactttggatttactctgtttaatacttgctaagtgtgtttcagtgtttgcttttcgataaatgtatttaaagcaaccggtttcttagtataattttactctgttacatttttgatactcagtgctttgtcattcatctctaagtatgtcataattttctctataatgttcatgatttaaataacyaaaggttattttacagtataattgtttgtttctagtccatccagtctgattagacgtaggattagaggaaatgtttttaagcatatgtttcaggattctaatcttttgcattataataaacatatcctgatggactgaaatttgattagtcttcctttgaagcacaatctatttttgtaaatgttctacgtgtcttggaaaagaatgtgtattcactgttgggtaaaatatttctatatgtatttgagttttttgcattattcaagtcttatatctttgcttagctactgatttctgaaaagggtgtgttagttgttgatttatctgtttctcactgtagtttgccaatttttacttttttaatatttctaagctgtatactcaggagtccatatattcatgatcattgtgttttatcaatcagttattctttttatcaggatgcttcgatgctttctttttttctctataaaaactgcattaaaagctaagaggctttttcccatttcatatgtgcctggttttttttgttttgttttgtttttttgagacaaggtcttgctctgtcgctcaggctagagcacaatggtgcaatctcaactcactgcagcctctgcctccgcagttcaagcagtcctcccacctcagcctcccaagtagctgggactacaggcacatgtcaccgtgccttggctaatttttgttttttttgtagagacaggatcttcctatattgcccaggctggtctcaaactcctggcctcaagcgatcggtccacctttggcctcccaaagtgctgggattacaggcatgagccaccgtgcttggccgggattttttttttaatctagtgtctcttggttggtgagcctgtttgtgtttcttgtgatgactattgtagttttaccatcttctttcatgtttttagttcattcttttcctagtcctttcttgccttcctttagaagtgtaaatttccttctgtatatgtgaaaatgcacattttatttttattcttctgagttatttcttagtttattttttctgtgactatcttacttatcagtatctgtatctttcctcccaaagccacactgtcctcatctcccctatctcccctcatctcttcctttgcacatcataccctatgatgaccatggtgaaaccatctagaattttagttctgggtcgtttagaacatacataatacggtggtgaatatattccttactgcaacaacagtgatcttcattgagatatattgtaagtttttcaaccttactttccataaacaggatctcataacatcctgctagattgacttttcttcttccaggaatgcttgaggaatgggaatctagagggtcttgaagtggtaagcctgtgaggccttgaattattaagaatgtctttaatttttttctcacatttaaatgatagcttggatggattaaaaatcaaaggcaaaaaacttcgataggataaagctttggaaatatgacttcattttccacttgtatcgcttgttgtcattaagaaccctgaagccatttagatttgcgttccattatatgggatctgcttttagaattttcactttaatatttgtaagttttaaaattatttctcttcaatgtgtgtttttcctgtgaatgtagtatctgtgagatcttccaatttcctttaacttaaataaattcttagtcatattttaaattacttactcctggttgattttcttttccttttaaggaatttctagtattatagatactgacacttctgtgtattgcatgtcttttttcttgtgtatttcccacctacttcatgaagcctcctggaaaaaatcttccagcccctgaattcattctcagccgtattcatgctgctcctcagcctatctattgaactcttcatttccacaactatacttttgttcacagtatttctaggtgtttctctttatacctgctcattttaattgccctctgtgtatttttgggacattttaatacatatattcctactctctggttcactaattctccctgtggggatagattttagctcaccatgtttagtagatgctgccttccttggtgttcttgtttgattccctgtgagctcttcttgcttgaccctcagggaccctcctctcataccactgcttcaggcattgtttctcctgagtgtctccctgacttgtcaccactttgcccttgtggtgtgagggaacaagcaaggagtggcttggtgttctgtgaaccttcatcccactgttctggcatttccttcctcatgcaggggggcggggggtattgaaccttccacaatctgccaactgtaatacggaggaaagaaaaaaggacaaagggtttttacccagcctctcctccacccgcagtagaggcgattgcctgccattttgtcctcattgcaagacccctagtttccccaggaatttatcccagttttgatttagtttctcaaatttgtcagctgcccttgcttctgagcgtctctgtcctctaagtttagattctgggagtgtggcagagcatattggctcatgcctgtaatcccaacaccttgggaggccaaggtgggaggattgcttgagctcaggagtgttcaagaccagcttggacaatatagtgggaccccgtctctacaaaaaatcaagaaagaagctgggcgtggtggcacatacctgtggtcccagctactcaggatgctgaggtgggaggatcgcttgagttagggaggttgaggctgcagtgagctgtgactgcaccagtgtgctccagcctgggcaacaaagtgagaccctgtctcaaaataaataaataaaaataaaaatagattctgggagcatgccagcagttcatgcccatgtgtggtcttgtcaggagttataatagacatcttattttgaaataatattattttcttctatttctgattagaaaattttaatttgtatttattgtaataattttggaaaatacaaaaatctcagagaaaagataaaaactatatgaatcctgacattaagagctatttgcagcctgcttttctactctttctgatgaactgtatagtgaactttacttaggtcatcatggattctaccacatgacatatgatatctgtttggtggtctgtcgcgtggatataccatgaaatgtttaactcttccactgttggacatttaaatggcttaaaacttttttccttaaaaaaacttatttcaaacagttgtacagtctgcccagaaaaagggcccaggacacagtttaaaaatggtaatactaatagaacaaaacaagcagcacctgttggaaagatcccataaacgtattggcaataactagcaagcacttttgattattgaagccgcagcctttctggccctggctaatcaaatgaatggatttgcttgtgacctgcgaacctgtatttgaatactacattttgtattatgttggtttgaaaagtcaacttaatagtcatattatttcaatagcttcttggctactctgtctgacttcaggggtagacttgagtttgagatgtgaaattccccagcatagtatagcaaaagctacatatacctagacgttagggcttggttttattatttacttactttatttatttatttttgagacagtctcactctgttgcccaggttggagtgcagtggcatgatcatgactcactgcaacctcaaactctatgggctcagatgatcctcccacctcagcctcccaaatagctgggactacagtgcaccagcacatctggctaatttttttttttttttttttgtagaaacggggttttaccatgttgcccagggtggtcttgaactcctgggctcaagtgattcacccatctcagcctcccaaagtggtgggattacaggcatgagctaggcctggttagttttagaaacttatctataatagaatgtgacactgatgtccttaccaggctaagatttgaagtatggaaaattgtagggcgtggtagaatattttgttgttactcttggcagtatgttttcatttgtgtttaggtttagtttgtttattgttttgatcttttctcatctttctgaccacaaaagaaacctggaaagtatccatcctacgcctttagctcttacctgaaggccttgaagactctccagcaccaacaccttggtctctgttctggaatgaatttggaaaaccaagcacagccagtcaaatgggctgtttccttcccatataacttttggccttgaagctaagacacgtggttctctggtttctaaggttccttgggtctatgagggagaaggagaggagagattatttgaaagcaaggattccacagggggatgtctgccttcgagcagtggttcttaacattttgtgggtcattaaccaaaagcctgatagtaagaatctgagagaactactccaaaaaaagtaataaaacatttatgcacattgacacagacttcgctttttatttctggggaccctgagtttatggagtcctcagaagcccattgttatttatcaggttaagaatctctggcttagaattttggaaataatttgtttaagaaatgaaataaaagaaaatgaattggcattttccacccagtcattccctgagcttatgatgttttattcttcactgtgggaattccttcttatccatgggattggaaggcggtgattggcctatgagaatgtctcctagagctggcacaattcccgcacctgtacttcatgatccttttccctttgaaggtcaggggaatgctcctattggctcattttcttgaggtcttaaagactctggcactggttgggcctggtggctcccgcctgtaatcccagcactttgggaggtcgaggcaggaggattgcttgagcccaggagtttgagaccaggctgggcaacatggtaaaactccatctctacaaaaaatacaaaaattagctggccatggtggcacacacctgtggtcccagctacttgggaagctgaggtgggagtcttactttagcccaaggaggttgaggctgcagtgagctgagatcacgccattgcactccagtctgagcaacagggcaagattctgtctcaaaaataaataaataagtaaataaagactggcagtaatgtagtttcttaaatctaaagaaaatatcttaaatttggatttcttgtatcaaggtttttgttttttgggttttttttgttttttttttgtttgtttgttttgagacagagtcttactctgtcactcaggctggagggcaagggcatgatctcagttcactgcagcttctgcctcctgggcttaagagttcctcccatctcagcctcctgagtagctagaggtataggcgcacaccaccatgccaggctaatctttttgtattttttgtagagatggggttttgccatgttgctgaggctggtttcaaactcctgggctcaagcgatccacctgccttggcctcccaaagttctgggattataggcgtgagccaccgtgcccagccgaatcaaatttttaagaactaaggcagttgctatgtaggtttgttttgtttttttgtaatgatttcttccccctgaatttccccaaatgttttgctgtttctgcaatactatgctctgatctggaagctctacagtaaaagttaaacctaatatatttgggggctagggtggcaggtaggctgagctactaatagtccatggatcagttggaggttggttccatgaagcaaggagggggagactggacaatttactggccctccacctgtttctttccacgcttgctatcttgtttgtcttatctggctgtacagcttctctctgcagaatatttccttctctcagaagtaacgtataccatttatgtgcatttgtttagttgttcattcattacctcacatagttagtgatatttcctaaacccctactttggggaacagagttaactaggctataggagaaacatgaaatttacagatgttataatagggggagaagatgtgtacatgcagaacttttctccagggtgcaggtgatccgtcaagtggatctgctgcttccatctcctcacctgccatgacattataatttgtttctcctgtctggactgctatatgggccttaaaaatgttctctgtctgtttgctctcacccacctcctttggtgaaatctcctgtaattgctgttaccagaatgtcatttgctgcttcagactgttggctcctcactgcctgctctgtcagtgggcatgatcctgacctttttggccctttaccaattgcactctctttactcaactcctttctccggcccaaagtacactctccatcctggccaagtacattcatttggcatatgcatgctgccttgccctgcccatgccctcccgcctcctgcagtctgcatgcttcccctcaccttcctgactcccactgcactctcccagtgtgaaattctgatgtttcctaccagaccatgttctttttatatattcatctgttcagcaaatgtttgtttagtaaatgctgtatgccaggcattttgctaggcaacagggaaacaaagttcttgccttcacggagcttcagagtcctgtgggggacacagacaagtaaatagtactttcagtttggagtgatcagtgctgagatagaaagtattagatgccccagggcacatattaaagggacaacttggtataggggaagggagagatgtccgggagatgttccaaaggcagtgagtgacccaggctgttgaaattgagtattaagttccttagccaaggagtgaaagaaaactggagcaaaacatcatctgccaaaaagccatgtattactgacctcagcacaccaatgtggctgagtgaggcccgagttgggtgttgctggctaggggtccccggcttgcaaagtgaccaagaagaagaatcacttgtttgtgactttcaactttgtaaggtattttaagttggtacttggacaagatggctttttctttgtgtgtgtatttgaacaaaatgttcccgtttgcagcactcattgagtggtcattgacaccagtaatctatacatttgccctttagtggtgaaatggagttgtttgaggtgtcagcttggtttggagtgtcactaaaagccttttaagcctgcttcatcacagtagccctgggaatcaacgagaaatgtctctgagttaagagctaaaattacaaacatccagtctgacctgatcatgaggtatcttacaatggttccaactcggtgacattcgacattcgtactgtagcactgcctctgtttgtttgttagtggtcatttaacattcaaaggaagaagatgctaatggccaaggttcagagataatgtttctagagtttgctctgtgttatatgttttgttttgtttgagacggagtttcgctcttgttgcccaggctggagtgcaatggtgtgatcttggctcactgcaacctccgcctcccgggttcaaacaattctcctgcttcagcctcccgagtaggtgggattacaggtgcccgccaccacgcctagctaattatttgtatttttagtagagactgggtttcgctatgttggccaggctggtctcgaacgcctgacctcgtgatccacccgccttggcctcacaaagtgctgggattacaggtgtgagccactgagcctgacctgtgttatatatttttatctggatcagtaggtcttttgttttatttgagagggagagagtcttgcactgccacccaggctaaagcgcagtggtgcaaacatagctcactgcagcctcaaatgtcagagttcaagtgtgaatcagtagttcttcatctttttggggtcatggccccatttcaccacccagttaaatttatggaaaagtatacacagaggctggtcgtggtggctcacgactgtaatcccagcactttgggagatcaaggcaggcagatcgcttgaggtcaggagtacaagaccagcctggccaacatggtgaaaagttttctctactaaaaatacaaaagttagccgggcttggtgatgagcacctgtaatcccagctactcaggaggctgaggcaggagaattccttgaacccaggaggtggaggttgcagtgagccgagatggcaccactgcactccagcctgggcaacagagctgtctcaaagaaaaaaaagaaaaaagaaaagtttacacaggcacacacagaattgtatataccattttagaaggttcctggatcctctaaagtccctcatctccctttagccctcgggatcattattggttcattctaacaaggtccatataaaatgattgccattttaagctaactgtgctatccattgatgccttggttcctttctcaccattctggtttccttgcagttgataactcgcacacgagaaacagtctgaggccccttacacatctgctgctaagaatcactgtcctgtacttcccttcctctcttctctggaaataatggatgcatatgtatttgttggagaagtacaaatagatgagttctgcccaagcagagaaaaagctcttacatatttgtgtgaatatacttgtgcaaatagaaaatagaagctattcacatatagctgtcttcaccactggcctttttctgtttccatattaaatgtttttcaggttataaagccgcttataacgtaagatcaaaattgtgttatttaaaaaataatgaagctcatgtatccatgcttatatataatagaaggtgaaaggaaaatactgaaggcacagctactcggagaccacaatgcagatgttgagactttgctattatttggaattttatttactgcgaaattgggtgggagagaaaaaagaggagtaagccttcttagtaaactgtgttgctggcttttttcttctgacgatccactgggtattttcaatggagatgaggaaaggatgtgtttcagatggaaacctttatgaactctcctgtgagctctccagcttctcaatccatgggccctcattttggtttcttattttaatcctaatttatttagaaagggtaatattttttgaaatgctttgaaaacaatcaaaattacattcaagctgtggtgagtaaaaataaaaacacagcatcctaagaatcacatagtagtgtgccctgggagttcctagttcacaagaagatcatggatgttaacctgagagacttactgaagtcatctaggggagatgggtcaagaaatagccccattttataggaaatccagctcagagctgtgactgaggtcatgaggctggtcatggaattgggagtagatttgaccttctagttcccaatccagggttcttcatggcttctatgccactgggacttagtgtaaatctccttacctctttgagtcctaaattccatattccgatagtgtatgcttatttcctgtgcttcagagttattctgagaatcaaattctataacgtatgcttctcaaagtgtgattccccaggccggcaatggcagcatctcctgggaagatgtgaaaatgcagattctcaggccccaccccaacctgaatctgaaactctgggaggggcccaacaatccgtgttttagcacaccgtccaggggattctgactcatgaagcttgagagccactgatgacacgtgagatagcattttgaaaagaagaaagcattacagaaatacaagataccttgttttaatggaggtaaaatgtatatatggtgaaacacaaagatcttaaatgtgtaatactgaattttgatataatcagtgccccagtgaagatacagaacttgttcatcccttataaagctccctcttgcctcctcccatcagtccccacccaacttaggcagccagtggttaaggacagactattccttagagaacataagagaactcgatgatgggttaaacgtagaaagagcaatgtctgtgttctcgtattctttcactatttgtaggtaatgttccttttaaaattactaaccatatttctgtgttctttttcagcccatggaccaagcttctctcaaaaacagcgatgttcttgttctgacagggcttacccagatccccactgcaaacccagatggaatggtgggagagttctgcagcaacctaggtgtgcaaccgtctctcatcttacgttggatgatctatcttgcatttattttacaataataaatataatattttacaataatgggggaaggagtgcttacagggtagcagttgtcaaaggagggaggcagtatatctttgcaaataatagcacagaaaagagtgttacactttgaactcacagcagcgatacagtgaacagatagatatgtatgaatgtttgtgtgtttgtttttgagacagagtcttctctgtcacccaggcttgagtgcagtggcataatcttgggttactgcaacctctgtctcctgggttcaagcagttctcctgactcaatctcctgagtagctgggactacaggcgtgtgccaacacacccggctaatttctgtattttttgtagagacatggtttcaccatgttggccaggctggtctggaactcctgacctcaggcaatccgcccgctttggcctcccaaaatgctgggatttccggcatgagccacagtgcccggccaaacaggtatattttttccccactaatatttggttggttttattttttcttcttttgaggaaaggctaaattaagagaggtatggggcattttctacctggaagaaatttattttccttcggatataactgtcactaaatctggaagttctgcttctcatttagacaaataggttggttactgtcttagttagtttgggctgccgtaacaaaatactgcagacattaacttctcacaattctggagactgggaagtctgagattagcgtgccagcatggtcgtttcttgatgcagatgattgccatcttgcagtgtcctcatgtggagaagaggggaagctctggtgtctcttcctcttctttttttttttttttttttttttttgagacggagtcttgctctgttgcccaggctagagtgcagtggcacgatcttggctcactgcaacctccgcctcccaggttcaagcgattctcctgcttcagcctcccgagtagctgggactacaggtgtgcgccactgtgcccggctaatttttgtatttttagtagagacaaggtttcactatgttggcccatctggtctcgaactcctgacctcatgatccgtccgcctcggcctcccaaagtgctgggattacaggtgtgagccaccatgcctggcctctcttcctcttcttatgagggcatgaatcccatcatggggcctgcaccctcgacctcatctaaacctaatcacttcccaaagtccctgcctctctgtaccatcacagtgggggttaggccaacatgagaatcttgtgggggacacacacattcagtccgtaacagctaccaaagaggtattaatgagctcagaccttcagctccagcaactttaagtgatattacttctgctctaggaagaagaagtggtcatcttatatttacacggaaggcactgttcttagaaattaaacttagccatgctaataaacatagtctgtttttgttctttgatactaatgcaaaggtaatttatttgtaccttagaaaaataattggactaatctcaaatagagtcttggtttgtatgtttgtttataatctagaatcacagactcaaagaactttaggcttgaaaggaaccttacatttaattcagtctcccaaagtggggtccactaaccgcattcccttaagaccaatgggattacttattaaaaatgcaaatttgggggccctaccttagacctagtaagtcagaatctctggggaaaggagacttccagaagaaaagttgcattttcaacatattctctggcattttccacgcaaactaaagcttgaaaattactgatctaattcattcttttcatgtaactgatgcagaaactgaggccaaggaaggttgtagtggctttcctgtggtcctgtgggttgggacaaaggtaggatttgagacaggctcttgagctatgaccagcgatgttgattttctccactgtatcctactctagtaccatactctagtaatagcaagtccaccagccctcaagttatagcatctaggtgagcctaagtacttaaagtataggggattttcctgcagacaaatgttaatgaaagaaaatactactaactcctgcagacaaacgttagtcaaacagaaaaactcggcctattttcttataggtcattcagccatggtcagagactgaacagagacaaatccagcaaatttttgagcaggatctaaaacgggaaggagcttggaggctctgtcctgaagctcagctgccattggtaaaaacccaaacccgtagtcacatgctctattcccagggacctagattagacaatgatgagaaaatcattatcagcctatagcatcccctgctttgatgtgttcttcaaaagaagcagcttattagacatgtaagtaaatcataaaaacagaagtaggaaaacaagtgcaaatcttattttacaagtttatctttataacactgcccttttgatatgatgttttttctcctctggcatccacttttctagctctgacagtccggaatggaggaaacgtgttggttccctgctacccttctggagtgatctatgacctcctggagtgcctatatcagtacatcgactcagccgggctttccagcgtccccctctacttcatctcccctgtggccaacagttcactggagttttcccagatctttgctgagtggtatgtccgtggtttttttttttgtgtgtgaattttatttgattcaggacattcaagcagtaagaataaaaataatcctgttttttctcacattactgtggaaatttcattttgttgtttttctgtctgtgataagattgcattattaaaagccaaatctgttgcattgctaagtttagaataatagttgtcaaagagggaagaatgcaaggcagagacttaccttagcccagcactttcaaaactggtaacaaaaatcttatatacttatcacatgtcaccctctgcctgttactaggtgaaatgacattctaaaagttaaaaaaattttcaagcccaatctcatgttgtctaaaatgtatagtgccaaatctgagaagaaaaactagatttttaaaaattgcaatagtatgatatttgacaaaattttattacatcagaaaattgatcaaatcctagagttggcaaaatatgaaacaatatgaaattagtgaacctttttagagttatttaggtgcatgtttgaatgtaactcacctgaccaaaaataaagggagaagaggaaaataacttttacaatatccccagtggtgccttagaatggtgcttcccaaacgttccgggactgtgacacaggcagtctaggctgcatttaatcccttttagtcatgaggtagccgatagacacagcatgtactgagtttctaattaaaaaggaatttgtacatcatcttctcatgatatattcagttacgctgcccccaacccttgcttttgtaaagtacttttttcattcccttctgtggtcgtttttttcccccctgtgtttagactcatacaggcgtctctatcccatgtacaaattattcttctttgtcactttttttttttttttgagacggagtcttgctctgttgcccaggctggagtacagtggcacaatctccgctcactgcaacctccgcctcctgggttcaagcaaatctcctgcctcagcctccgaagaagctgggattacaggcacccgccaccatgcccggctaatttttgtattcttagtagagacagggtttcaccatgctggtcagctggtctcgaactcctgacctcaggtgatccacccgcctcggcctcccaaagtgctgggattacaggcatgagccactgcgcccacccttaaataacattagtacattattattaactctgaatctttattctgattgcaccagtttttccacaaattttttttttttgtttttgtttgggatccaatccagggtaacacattgcatttaggcctttgatttttttgtttttttgcaagaagttttttttagttttttatactgatagttttagtctcttttgcagtttcttctgttgatactatgtttagaaaattcttgcctctataggtgtcacatggctaaacatactttctttcagttttattgtagcttctttctttctttttttacatcaccccttaactattttatctggaatttgttttagtatatagtatgaagagaagcactaatttcattttttcccaagtagtcaagtacttacctgtccaagtactatttattgagtaatgttaactttttcagctgatttgtattaatgccatatgccagactttcatatgcaccaggttttgtttctagactatcctgattgagtgatccattcattctttggccaacatgatgctaatatattttaataactgcagcctcacttataattgtactctgtggtaaagtacatttctccattatttttcttagaattcttggagctatttttgcttacttatttttgtggaagaattgtggaatcactgtatcagttttcagaatatctttttgagtccacaaaacctataaattacagtttgcagtagttttcccatgctgagacatgggatgtgtgtctgtcttttaagcttttcaaatattcctcccgtagactcttaaactcagtgatcatattattcttgtttccatcgatagttctatttgcttaaatccataaacctttaagtgccaaagcactgaggatacaaagaggtccctgaccttgaggaatctgtaccatgaaggaagaggcagctgtgtaaacctcttaccactcggaagtaatctgatggaaatatatacacacatacccacacacacacctacgtatatctgtatggtattcagagaaggggtgggtggtgaccccatttggggggttaagaaaggcattctggaaggaggtgctcctgaagaataaccaagaatcagccagacagaaacactatttaaggatgagttgggtggtctgccggcggtgatgtgtgggtggagaggataacacaagccaagacatagatgggaggttagaatggtttggtttgttcagagaactatccatagttctttattgttacagtatgaagttcagggtggggagtggcagggtatgaggctagagggatcctgtccatgggggggattcattggaggattctaagcaggaaatgaacatgattatatgtgcattttatatagagccttctgcatttatgtgaagtttgttgggaggtggtgggagggggtgcaactgaagtacaagacaagagtctttgcagaagtcgagggactgaagactccagtctctaccatcctggaggaaagcaaggcaggaacccatatgagaggtgattaggaaatacaaggggcaggacttactggttacttgatacagaaaaggtagcaatcaagattgacaccacaatttctagtgtagtagatcgtgttgaccccaaacaaaataggttctacaaaggaagggtaggttcatacagcaagtgtggttagcttagtttggttttgtccctgagggcattgacggtgcctgaggcaggggatgtgcaggtgaaacttgtccaatccaaagatctgagaagcccaggctggagtcataggttggggtgtcctcagcgttgaggtagttgagtggctgggattgccacaagaatgaatgggattgtctggggagaggatttgaggttagaagaacaggcagtggggaaaggatggacttaagtaatgcctgcatttttggggtcattagagaacaaatatttaggaaaagtgtgaagacaaatagttaaagaagtagaagaggccgatcagggtggctcacacctgtaatcccagcactttaggaggccaaggcgggaggattgcttgaggccaggagttcgagatcagcctgagcaacatagcaagacctcatttccacaaaagattaaaatattagcagggtatggtggtgcatgtccatagttccagctactcgggaggctgaggcaagaggatttcttgagcctgggggatttctctgtgtttctgtttcactgtgctgttctctttcatgcagccttgctgtaaggcaccctttttccctaaataaggaactcagttaccaaaatggagagctgctagctccagacttgcattaacttagcaagtcccagccccccatgccaggaccaccacaagcctgtgctgagggtttggcttcctctcctctttggtgttctgaacgggtgcttcacagcctggctgctctgtgctcagcctcaggcccggcctgctgttccctatcactctggttccctggctctgtgcttcccgttctcaggggttctgctctggcttctacatggtcctgctttgatgcctgcagaagcccagccccttgctgtccagtgtctgcccttgctccgagctaaggggcttggttgtttgggttggttttgtttttgcaggggatggagatgggagggaatagctcttgaaagacctctctgatcttttggagtttggagtgttggggttcggagtgttggttggttggtttttgagacaggctctcactctgtcgcccaggctggagtgcagtagcacaatcacggctcactgcagcctcaacctcctggtctcaagcgatcctcccacctcagcctcctgagcacctgggactacaggtgtcaccatcatgcccagctaatttttgtacagacaaggttgcatctcgtctgaacccatgaactcctgggttcaagtgatctgcccgccttggccttccagagtggtgggattacagtcctgagccacagtgcctggctctgatccttttttgaacaagcagtggaagagtgtgcggtacctgaggtctggccatcagggagcaggagggtctgtcacattcccaattagagataatcctagaagcgccatttattcttcattcttcctgataatctggtatacacagatctccttttgaactctaacagctacccccagaagaagcaaactctaatcaggtccttcagcctctgtcttagaaagggggtgggtccctgtctgctgtgcctgcatgaggattctagagcagagtatggaggatctgttagcagaactggcctaagcattatgtaggtgggcttcacaatctctaatcatattgtaatctcttctgtatccctaatctctgcctttaatgcatgtaggataatgtcctttggaacaatcaaaataagtttagaaccaagctcttatatttgtctccctgagctagaaataaagacagaactagtgtctatttagataatataaggtaaccctccaaaagcatcttgctcttccatatttatatcttccaagtagggtataaagtgatgtttttttaaaccaaacttaaacgaaactaagggtaggaaaaattagatacaatgtattaatacaaaatccaagccctgaagtcctgagctcctcccctcaaagtagtgactatttttttaaatgtcaaacctgcacaacacccacatatattgatttatcaactgtgaactttttgccacatttgctttatccagacatctcagtattgtaaagtcataactgactaggaaaaagcaaatgtaaattaccaaaaacattcacattgtctctagcctgtgatcctttgttcttctctagttggagttaccaatgctgctgttaaaaagagtgtgagggccaggcacagtggctcacgcctgtagtctcagcactttgggaggccgaggcgggtggatcacctgaggtcagcagtttgagaccagcctggccaacatggtgaaaccccgtctctactaaaaatacaaaaattcgccgagtgtggtggcaggtgcctgtaatcccagctacttgggaggctttggcaggagaaccactggaacccaggaggtggaggttgcagtgagccgagatcgcgccattgcactccagctgggcaacaagagcgaaactctgtctccaaaaaaaaagtgcatggacaaaaacagaagccatgtctcaaggtgtagatcactttctttgtgaaattgaccacaactaaatgcaatatgataccacggattggatcctggaacagaaaagggacatgactggaaaaactagtgaaatctgaatgaagtctggagtttagttgattgtcattggcctgatgttaatttcttagttgacgactgtgccagtcatatcagatgttaactctggggacatagggtgaagaggccatggaaactctgtactgtctttgcagcttttctttaaatctaaaattattccaaaataacaagtttatattttaagaaaaaatgtattgagaaattctaaagtttaaaaacatacaagatacatctcttctctgtaggcactggatttcattcacagtgaaattcactggcgggaaatttttaaataaacttcagtatttaatatttgcactgctgccactaggtggcaacagatgccaccgtatgctcttcctcacatgctgatgtgtttttcctctttaataggctttgtcacaacaaacagagtaaggtgtatcttccagaaccaccttttcctcatgcagaggtaagaaaacaaaatcactgggacatgggaaggaagcaatgtggataacctgatgcagatgcagacagcaggtcattagatgaaatagattgctgtgtaaacctgtagacccctttgcctcccaagtcagacacagggaagtattttaactcaagcttcacttgctttcctcctattaacactttctattgcgcacgtggagcagcccttctccaaaatgttgtggaccgcagaattgtttcagacttgggattcgggaatatacttactggttgagcatcccaaatttgaaagtctgaaatcaaaatgctccaatgagcatttcctttgagcatcatgttggtgcccaaaaagttcagatactggaacattttggattagggatgctcagcctgtaccatgttcatgcaattcatagcctgcttctgttctactgactgcatgatgaattgtatttcgatacatattactacctttttaaattgggtttatgtattgtcagagtgttctttccagttatgtcagtcatatatgtacatttttagtgacgaaaataacatttcagttcaacaaataaaaggcttcttcctccctcacagaacaaatgggtgttttctatatagctgaatacctagctttgttgtcaggttcttttcacccaagggtatattatgaacgtttttctgcgtctcatgttattattgctctactacaatgaagctaacagacaatagttactcctcatttttggttatattttcactcaaagattctctaaattggtatcaccaccttagaaaactgacagtattggctgggctcggtggctcacgcctgtaatcccagcactttgggaggccaaggcgggtggatcacaaggtcaggagatcgagaccatcctggctaacacagtgaaaccccgtctctactacaaatacaaaaaattagccaggcgtggtggcgggtgcctgtagtcacaactgctcgggaggctgaagcaggagaatggcgtgaacctgggaggcggagcttgcagtgagcccagatcgcgccactgcactccagcctgggtcacagagtgagactccgtctcaaaaaaagaaaaaaagaaaactgacagtatctgctaaagctgaacaatgtactctatgcctccgcagttttgttcctaaagtatacattgaacagaaatgcatagagatgttaccaaaagacacacacacaaatctagaatttggtcaggtgcggtggctcacacctataatcccaacactttgggaggctgaagtgggaggatcactggaggccaggaatttgagaccaaccttgacatcatggcaaaaccctgtctctacaaaaaaatacaaaaaattagcccggtgtggtggcacatgcctgtagttctagctaccctagaggctggggtgggaggatcacctgaagctgagggagttcgaggctgctgcagtgaactgcaatcgtgctacttactgcacaccagtctgggtgacagagcaagaccctgtctcaaaaaaaaaaaaaaatctaaaatttttggtaatagtactgaaatatactcaaattcccatcaacaatagcatggattttgtggtatactcacacggtcccttacatcactgtgaacaaataagctccaattatatgcagtgtagataaactgcacaaacataatgtgagtgaaagatccagatataaaagagtagatatggtatgattttatttacataaaagttcaaaaacacaataaactgatctgtggtattagatgccagtgtggtagtgatcctggaggggaggggacagtagtgacaggaaggggacaaagagggatttctgaggagctagtaatgctttatttcttgatgtacatgtgttcaccttgtaaaaaatccatcaaggtgtagagagttagatataaggaaagagtgaaggctggaatgaatcctgtgctgttggatagaattgatggtattggtgtgaactcctattttcaatatatgtagatacagaaagaaatccacttgtgcatgtgtgtgtatgtgtgtgtctgtgcacatacgtatcttccagctctggccacacagagggcctgggagcagtgacatgccactaactgaggaacacatttagctcccacatgttggtttctagataccattctccactaaaaggaaccaggcctctttggaaaatacaagatgaggctgtaagatcttgctgtatgctcagagaaagatggggacatgtcagaagccacatctgagatcactggaacatcaaaataaataatgctagtaatgaatataatccactgaataacagaaactcctgcatccatagtgaggtaactgagtacataggcaagaggggaaagttcttccaacagtaaactcataattaacataggaaagaaccttagaattagaaaatcaccatttggcagccaccgcagtaataatttattcctgcaagaaacaccagtgggtgctaaaaccagtgggtgaaaatgttatgaagaactagatcatttatagtcccaaaaagtatgtccccacaaaagtcatgtttattacaaagacagaaatagtaactggagtttggacaaacttgacatatgcaatcaacgttaacatcaccagtaattggactaactgacattgcgtggctcttaacacaaattattgagaaagcagcatgatttctgtgatcctgctgctaaaaatgcttcacctgaatctagtgagcattcagacccaagtcgaggatgctcaacaaaataactgacctgtaccctttgagaatgtcagagacctagaggacaagggaagactgaggaactgccgagagaatgaagagatgtgacagatagatgtactccatggccatgggctggatctggaaatggaagaagaaagatctagtttgtttgctattaggagcattgataacagttggtaaagtctgaatcgggtgtgtagatgagagggggcagtgttgtgtcactgttcattccctgcttttgatggttgtactgttataatacatccatgttaactgcgattatctccccacactcatttctttgattgtcatatttataacccctcctcaactaaggcaggtagactgtttttacttacagcatgtcagtgcagatagatatgtttagggatttagttgttttgttttatagttaactaacacgtatttcaacaaatgtcctgctaattactttaaatgtaattgctgttttcatactgtaaaggataggtcttttatgaaccaggatgccaagtagaaggttttgaagaagttattttttggtccctgtagtctaaatagtattttggcagccagggtttttgcaagctgtgtcaatgccatagtgaaacacaggctagaaatattataaaaatgtcagaaaattaagtgtggcaaaacatcttgtggtggactttgctcttgaatgtctgttttgcttcctttgcagtcagccttgctgtagagcttgttttctaggagtgtgatcacattctcactcacacacctgtcacaaatgacctggtgccatttagagttaggaatgtgagtagactgtggtcgtaccatgagggttcctcaggtgcacttgtcgttgttagggcatgagggagtcaacccttggtaatgttaccaatgcccatgagaaacggtggttccacccttagtactggtaacaaattactgttcagaattcctgccccacagcttcatttccactggtcaaatgcagtaagttggctagaaaggtagatccaattggcaaaaaacgatgaatttatcttagtttctgtgcattgatcagtagagctacaggaactatagataatgcttaaaagtgacttacgtgtgcagagacctgctgctattcttagaatcacattcatcatcttgacatcttaggatacaatagaccctttttgacagccactcacccatttaactgagacaactaatgattttggccatatagtttataaaaagaatgtcagttcaacttgcagactacctggaaggaacgtgggaattcgatgtttgctccggctttactattcatattccatccaagcatgcgacagctgatgaagatctccaggatagtgttagtgtcttcctaatacaaccaggtctcttcaattaaagatgaggtcttcaaggtgaagagagtttggcttctgtttggggtatgtcctattctggccacatccccactcttagggtgacttcatttgcacttcaaggtgttgcccagggccctctcatgcacaacatgtggcaacaggattgagcctatcacaggccattgctttatccatgaaacagccttccagagcagtgcttcctttggcctggttgatatttagggtctgtgaagtctgggtgtctagcctctggatgctggggtggggcaaggaggcctgggcagcaggcacagtgtctgagacgttacaagatgccatctagtcataactgtctttgctattgccttgaatgggcctgacactgggagatgattgtcaagtgttgtgctgcaggggagactcttggttcaacacgtacacttgaaagaaagctttgaggctgcggggcacctgcttctttttttttttttttgagacggagtctcactgtcgcccaggctggagtgcagtggcgccatctcggctcactgcaagctccgcctcctgggttcatgccattctcctgcctcagcctcccgagtaacggactacaggtgtccgccaccaggcccagctaattttttgtatttttagtagagacggggtttcaccatgttagccaggatggtctccatctcctgaccttgtgatctgcccacctgagcatcccaaagtgctgggggtttttttgtgtgtgtatgtgttttttttagtgacagggtctcagttacccatgccagaatacagcgttgcaatcatagattactgcaaccttgaactcctgggctctagccacagtatccaacaactttttttattttttgtagagacagggtcttgctttgttgcccagcctggtctcaaacttctgggctcaagcaatcctcttgtctttgtctcccaaagtgctggaattacaggcgtaagccattgtgcctagcccatttcttaatataactgtctgtgttaccaggacatcacatttctaaaagccaatttgatctttgtcgtgcatgtgtgtgtgcgtgtatgtgtgcatgtgtgcacacatgtccacatgctgtacacattcagagaagcttctctagtagcaaacaacagaaatgatccctgaaagtacagtctttggtcttggtccttattcagttgctgcagtagcttaacacagctctagctttgcaggaggaggtcctgtactggcaaacagtgtttctggtgtgacagatgtggttactgtcaccaggacttggtgattcacgagtgttgggaaagtcacttgtacttcaaacaagaagtgataatgagaacttcaggcctggtgtggagtgtcaggcagcttataaaggaagagtccagctaaagcaggccataacaatctgaatatgtttccaggaagtatgtcagtattaccagaaagacttgacttgcccatgtgttccacaaatcacattctgggtaaaaactattttaataagattcacttgtatttttttaaattaataagtgttacttttcacagcagttttaggttcacggcaatcatatgcccctgccccacacacgcagttgcccactgcaccatcccacaccagagaggtgcgtttgctacggctgatgaacccacattgacacgtcactctcgcccaaagcccagagtttacagtaggggttcccttggcgttgtgctttctatggttttgaacaaatgaacagtgacctggatccaccattacatcatcacacagaggagcttcctcactctgcagatcctctgtgctcagcctgttcatttcactctccacgaatccctggtgaccgctgagccttttactatctgtatagttttgccttttccagaacgtcatacagttggaatcataggggccttggcttttcagagtggcgcccttcacttaggaataggttccttcatgtcttttcgtagcttggcagctcatttcttttttagggctgaataatattccattgtctggatgcatcagtttcatccttcacctgctgaaggacacatcttggttgtttccacgttttagcaattaggacattcatgtgcaggtttcttgtggacatgatttttcaaaatatctttcaaagtggctgtatccttttgcattcccaccagcagtgaatgagagtccttgttcttccatatccttgttagcatttggtgctgtgagtgttctggattttggccattttattataacaggtgtatagtggtatctcatcattttaatttgcagtttcctaatgacatacggtgtggagcattttttcgtatgctcatttgccatctctcttctctgatgaggtgtctgttcaggttttttgcccactttttaatagggctgttcatttctttttgctgaggtttcggagttcatagattctgggtcacagtcctctctcaggtgtgacttttgcaggtattttctcccaatccgtggcttgtcttctttgttggtattttagatccagtcccgctcaccctcccgtactttggttcccccttcagcctgggcaggctcacatttctttgtattttttctatattttccagctcattcagaccaataagctgaagcactaccccagcatccacggagacttcagcaacgactttagacagccctgtgtggtgttcaccgggcacccttccctccgcttcggggacgtggtccacttcatggagctctggggaaaatctagtctcaataccgtcatattcacgggtaagtgaaaaaaataaagaaacaaattggttctctccactgaggccatgagtgaatgcacctacaaggtagagacccagggaaggattttgcagtgagacataaatacaaacattattctactgtaggtaccaaagaatgaagaaaccgcagagaaagagtgaagcagtgtgtgccattggacagctgggcatccagcgaggccttcatgcctgtgttttcagatttctccaagacagaatcctgctgagtgcttttgctaggatatcgtaagccatttcaagaagtgcagtgattcagtaacggtcttgttttacctgttaggaattgtttacagaggtagatctttttcttctgattgtggtttactctaactgtggattttcttctggagacaaatccctcaggggaaaaaattcctttgataaggtcaagtagagtgtttacatagataatgactgtatcattttatcagtgtagcgtgcccagccctttgaatgctaggtcttttttgcttatctgtgataggggatatcttggaaattatgcacagacctttttttttttttttttttttttttttttagctcatcagtcatcattagtgttagtgtattttatgtggggcacgagatagttcttcttccagtgtggcccaaagaagccaaaagcttggacacccatgtgttagggtcttcagtcggccttgggttttagaaatcttacaggctatgaagaaaaaagaaaaaaaaaaaaaaaacattgatttgaaatctggcccagcttgcagcaacctcagccaattcaccagcaagcatgactgtccccacagtaaatgggactgtcagtagctacctctgtgggtcactctgggcaccaggcacagaacccggcacatggcggctgttgggaaagcactgtcaccagctcccttcctagctttaggagctgggaatccagttacaccagaagcactggggtgacgcttcagcccttcccccagctttcatttgtgacctagaggccaccaggaacacgcctgtggtcaaaccaagttgggtttattgcctcatttcagcaaggggaacacacaccatgggtaaaagaaaagcaaaaagaccttgcaggactccggctggtgttcggtgatgcgcaggtgttcgcggaggtgaggcgtcaccctgtattgggtggcgtcaggatgcagggtcattctgcgatgggtttcttaactcattcttatctagaacacaggaagaatggagccggcatagcgggaagtttgcttatgctgtggtcaggacagttctgtgttccgtgttcaggatgattacagaggggtcttgtctttggccggatccatcattgtcagacaaggtgttggtgttccaggaagttgcgttcacacagcaggaggacacatggctttgctgtgggtgccaggccggctcttgctgataccaggccaggcagaaagtgccaggagaggccccggtcaccaggactgctttcctcttctcaggcctgctttgggctaaaggtggaggaagttgggccacaagatattgattgacaacacccagaacttcatagctgccaagatttcattaattaggaggttgtccagagaatgtcctatgtagtggggctgaggttggtgtctcctgctcctgctgctgagtggtgactcgacatttgacatgacagtggtgacagcatctacacagcacagtagataacctggcctttagtacaaatgtttcttcagctaaaaggaaatcaggactgtgtgatttcctgtgacaactctgggtaatgggtttgcatttaaactggtttatggggcttccagggcagaagttgtgtctgggagaggttggggccatctttttttattgttttgtgactcctggatacatgaaaagggggtcagtattctcagagaagcacaatccactggaatgggcatttatgtacctggcagctctgccagtttgtcctgacaacagtggagacgtctctgtgtctggtgtgcctaagccagggtccctcgtcgctgggcacagactgtgctgggaatcaaagtgtcacatcagttaggaccgagcgaggtcttttggctcaaggcaggcagctccctcgagttgggggaatgttccctgccaagcaggctgcagcagccctcaggagacaggctgagcagagggcgaggactcttcccggtctgaggggctggggctgctggggagcatcccagtctcagtctacagaccattcacgggcctggaggcggggccgtgcgcttgtcttccgggtgcatctcacacctgggcgttaactcagagctgattctaggttcccgggtctgtaccaggcctctccactgtgaagtcagtttttcccattgtattaaatcagtaccttgtgggggactctttgaaactatatacatattctgttctccctcaaaatggtatctgatatttttagcatttgttgatgattttcatctgaataagtgatgaactgtaatggttgccaaacggtggttttggtttttatttcatcgtttgtttcttggcatttcgttgtaaaaagagctttcttttctcccccacatatgtatttctccctcatttacctcatctgcctctgctgaagcttggagcccacccacagggtccatcccagcctgcccctccttccacggggcccctttgacctccgtcccccacgtgtgcttcctggctccctcctgaccccctgactgtctgtgggccctcagcgccccagttgctgtctggcttggcagctcctgtgtagtctgcattgtaagatttctttcttgtactttccctagaaccagacttctcctacctggaagccctggctccttaccagccgctggccatgaaatgcatctactgccccatcgacacccggctgaacttcatccaggtgtcaaagctgcttaaagaagtgcaggtaatgaaggacactgcttgtgccttcacgtagtcatgtcaccttggtgtggctcatgcttgtgtggggtgaggggagagagatctagctgtgtttgattcttgtcttcagttctcacgcatctgcagaatgctgggacacatgccagcccccctccacactgaaaaggagtggtctttacaccctgaccgcagtttccattctaaagaaatcagatgtggaagggaaagaaaaccatctgtgtccgcttaaaagcaaaccctctcacccctgccaaaaaaaaaaaaagtcattctagaaacatactcactaagctgagacagtttaaatgaaacgcgttactggggccgtgtcgcacgtgtaggctggtaccacaaacagtgctgtcgggtttgggttttgtggcagtttttggtcatttgtttcacttcacattttctgccctggagaaagggaagaagtagctggggtgcagtgtagaccaggaggcgcgcgtagcaggaaggcagggccacggaaccactgtgctggctcagccactgctcgctgggtttctggctcttgagagtcgggagaggaactggaattggcaaggaggacagctgacaccggcgaggaagagctctccctttccactccctggtgttcccaggagtgagatgagggtggaggggcccagcacagcaccttcaacctcaggatgagagaggccctttcacaaaactctaaggcaggggaacaggaaacagagaaagccggagaaccccaggagggccccaagagcggattctggtgattattaatgtgcttgcccaatgaagaaagaatactggcactctctaggtatgatgagagcagacagcaaacgtggggcctgtctacagtgattcgctaccccaatgtatgctcatccacgttagaagcagcagtgaaaggcgtgttgcttttcattattaacttcaaatcccagtccctaaaccagctcttgacgcccctctgtcaggtgctaatcctggaaactggaggccacctggtctccactttaggtgaggaaaacctgggagaagccatcagactgcacctgtggcatgagatgctttgagacaggtcaagaggaggagcaaagggcagtttggaggagaaaagtattagccctaaggaacaagtgcttttggaagctcagcccggtcagcctggtggaaagccgtcttcagcagggaattcagggcttggtccaagctcttaagtagaagcagggacaacacagtgcccctgtgggctgccagcattccttttcatttgggtgatatttgtgcaaagtaaaaattggtttactaatctttttttctcaagataacaaaaagagacattttgtttaaaaaaaaaaaaacaaaaaaaactctgcctctgctccttggttgcacatggtgagcacatgagctgaggagtgcccactgcctaataccagctgacctgcagatccagcggaaactccaaacccacagcgccagcccggcacgaaaagccacagctcttggtaatcagccaagagcttataatagcaggcatgtgggaatgttagagaaagaccgtgccccgaggaagcccagagaccgctgggagcagacacatggaagttaccgtgaaacttatgtaaacagtaagaaagataaattaagctgaggcagtttaggggtttccgagatgtttcttctgccccagtgccttcacgttccctctcctgtctacggttcattgggcttgagaggatgaaagttcaccttggcctggaagtggtgagcctgtaatggcggggagtggatcggggtcaggaatgggccttccacaggggccactgtacttcacaccacctttctcaactgtcccattggttcctcagcccctgcacgtggtgtgtcctgagcagtacactcagccgcccccagcccagtcccacaggatggacctcatgatcgactgccagccccccgccatgtcctatcggcgggctgaggttctcgccctgcccttcaaacgtcggtacgagaagatcgagatcatgccagaggtgagctgttctccttcctagggttaaactagagctttccacagaggctcttggagatcgtgcaggggtggccttcttttggatttatgtcaagtataaatgaaccaggctgcgcgcagtagctcacgcctataatcccagcactttgggcggccaaggtgggcggatcacttgagggcaggagttcgagaccagcctggccaacccagcccagccaatatggcaaaaccccatctctactaaaaatacaaaaaaagtagccaggtgtggtggcacgcatctgtaatcccagctactcgtgaggctgaagcctgagaatcgcttgaaccaggaggtggaggttgcagtgagccgagatcacaccactgcactccagcctgggcaacagagtgagactccaagtatgaatgaacaaagaacatggacccttaaccaagtaaccgggaagaggggggattttcagggccttcttgtttttcaactaataaaataacagctgttagtcaggactgctccttacctagcattcagcagcgtgagccctgggccacatcatgggtcagagccctgggaagtggagatgctgacacccgctctgtccctaaataccataggatggtgacttttctcttccttcctggacctcagttatgagtgagtgtcaagagtttgctgaattcagaggtagatgggggagataacaggaaccaaaaaataaggattgtaaacttggttatttatatcctcttgagcatacttgcaggttttggtctatcaaagtctaagtattttataggtctgtgaactcttagcttcagttttagcagggaaagagccaaagcatgctgtccatgttgaacagctgtggcatgctgcgcttgggccactcctctgagagggagacagagagggacgcggcctctcctgaaagacagcgttgaggatggttggaggctacctctggcttcctttcacctcttgaggcaacttgaatgtgttttcaacagacaggaaaaagaaatataaaaacttattgttaaaaccagtgtgcccaaacttcttttggagtttgaggttcagaaatggcctccagaccttgggttggaggtcttggctcctgaatgtgactcatttccatgagcctggagaggctgctagggaccaccaggtgccatctttatggttgtttaatgtttaatatgtttttatcattttgttatgattttttcactttctctggattgtttttgtctggtattttacaggggctgggattgacggccttggtttagatttcaactctctaagccagcattccttaaaccttttggtctcagacatccttacaaatagaactccaaagaggttttgtttatgtgggttatgtctattgatgtttgctatatgagaaattaaaactaagacattttaaaaatattcacttaataatacaaacctattatatgttaacataactaagggataaagacaaaagcaaaaatcagtcccagtgccagggataaatgttaagattttgatgtatttgccttgtctgttcactgtgtgtgtgcctactggaatcacacctcatacactgtcgtctttttcacctatcagtaagtacattatatcatttaagatatttcagccaggcatggtagctcactcctgtaatcctagcactctgggaggccgaggcgggtggacaatgaggtcaggagttcaagactagcctggccaagatggtgaaaccccatctccactaaaaaaaattagctgggcgtggtgtcacacacctgtaatcccagctacttggaggctgtggcagagaattgcttgaaccgggaggcagaggttgcagtaagccaagatcatgccaccgcactcctacgtggatgacagagcgagactctgtctcaaaaaatatatatttcagctgggcatggtggctcatgcctgtaaaccccagcacttcaggaggctgaggcgggggtgaatcacttaaggtcacgagttcaagaccagcctggccaacatgatgaaaccttgtctctaataaaaaaaacaaaaattagccacaggcgtggtggcaggcgcctgtaatcgcagctactcgggaggctgaggttgcagtgagccaaaatcgcgccactgcactccagcttgggcaacatagcgagactccgtctcaagaaaaaaaaaaaagatatttcaaaagcttcagctttaatggttgcataatggtctgtcataatttaacagttccttttttcatagatttttttttttttttttgagacggagtctcgctctgtcacccaagctggagtgcattggcgcgatcttggctcactgcaagctccgcctcccagcttcatgccattctcctgcctcagcctccctagtagctgggaccacaggcacccgccaccatgcccagctaatttttttgtatttttagtagagacggggtttcatcgtgttagccaggatggtctcaatctcctgaccttgtgatccacccgccttggcctcccagagtgctgggattacaggcgtgagccactgcgcctggccccttttttcacagattttcatttctggtttttctgtgttataaataacacttttaggagcatccttttacataaatctttgtccatatatgtttatttccataagaaaattttctgaagttagaatttctgggtcaaagattatgaacatccctttctggctcgaggctatatattgccagcttgtcctctagaatgagtgtgacagtttatactcccacagcagagctggagacagctcttacttctgcctccttgctaatattgaatgttgtccttttttagttattttccaattttattcaagtcttttccagttatataagtatacactgttatctaattttaaattgtatgtctttttttttctttttttgagacggagtctcgctgtgttgcccaggctgaagtgcagtggtgagatctctgctcactgcaagctccacctcctgagttcacgccattctcctgcctcagcctcccgagtatctgggactacaggcacctgccaccacacctggataatttattgtatttttagtagagacagggtttcactgtgttagccaggatggtcttgatctcctgaccttgtgatctacccacctcggcctcccaagtcctgggattacaggcgtgaaccaccgtgcccggccctatgtctttttttgagacggagtcttgccgtgttgcccaggctggagtgtagtggcacagtcttggctcactgcaacctctgcctcccgggtgcatgcagttctcctccctaggctctcgagtagctgggattataggcacatgccaccaatcctagctaatttttgtatttttggtagagatggggtttcaccatattggccaggctggtctcaaactccagtctgcccaccgtggcctcccaaagtgctggaattacaggcgtgagccaccgcacccagccaaactgtacgtctttgatcattaatggaggtaactgtctcaatccaacttgctacagtaattgcctttaaaatggacattatggccaggcacattggctcaggcctgtaatcccagcccttgggaggccaaggcaggaggatcacttgatgccaggagttcaagaccagcctgggcaacacagcaagacccccgtatctacaaaaaaataataaattagccaggcgtggtggttcatgcctgtagtcccagctactggggaggctgaggagggaacatcacttgagcccaggaggttgaggttgcaatgagctatgatcacaccaccacactccagcctgggcagcagagtgaggccccatctcaaaaaaaaaaagactccttcagagtcgtcttggaaatagtgcatggctgcccagggagagcgcagaacgccatccccaaagctcccaccccagccttgtgcagggaggaggggcctgtgtggaggaggcctcaggtgaagaacgggatctggcgcacaccctgctcctcggcaagggccgcttcacgctcgccataggccgttttcttatttcatgaaacaggcctcacgtaccacttgccaatctgcttaagtatcctaagctgcttcctctgcccgtttggtattgatcttcatgtttacataatggcctcttgcatgtttttgtttttaaataaaggtggcttggctaggtaggggtctacatgtcttaaaaaccatgcagctaaacccagcaacagagcacctaataaggtcaggctgcacggcagggcacccatcaggtgcaggtggtcggaaagataccaccccccaggtaaagccgtggctcccaccatcaggagaagtcagactttcaggaagagagagctccctcaaccgccatgctgctgtccccgtccttcctgccactggtcacctggagaggggatgagggtgaagtaaaggccagaatgaatgaaaggctgcacttggtgtgtcacctgggcgacagagcaagactccatctcaaaaaaaaaaaaattgtttacctttaaagttatttcatctttttagactgcagtgatgtaaatacagattaaaggaagagtaatggtcatcattaaaggcccccagcctgaactgcgccctttgctttcagctcgcagattcactggtgcccatggagatcaagcctggcatctccttggcaactgtctcggccgtgctgcacaccaaagataacaagcacttgcttcaggtagggggtgctgggtgggagtgcaggggaccctctccccagcaagaaaccagaccacctaacagattatatttgaaatagcgcttcatgtgaattcttgttgaagaattatttccctggccatgtgcctcagagaggctgctgtgcccagagatgaggccgcacgtcatcccaagggctgccacaggcacattctgttggggagcgctgccacacgaggcagggctgtggggagacgtgcagggtggcaggtgcagccctgcccttgggggctggaaccggagggcacctgcgtgaggctgtggctacctgagagcctggtcctaccaatgacccacacacaggtgggtggcacttcagctccagggcaggcactgtgtcttaagaattcctttcagatctggactgtgtcacctttatgccacatgtagagttgctcctagctaccacttaaagtctattagaccctgtgctgggtccttgacccgccttgtcttactgagccgtcagaattcactgctgtcatcatttcgtaggcagcttctctaaccttggccagatggtggcaaaggtggggtttccccctttggtctgaccccacagccagtgtgcccagccacggggtcatgatgtacctgcagcacgacacagtgtattctggagaatttactcagcagatactgaagtgaaccacctgaaaatttaaaaatggatcttgatagaaggcagagatcttagcgaataaggtgttggtaggctggacagttgagcattagagcgcgtggatctggggctcccggcagccagggaacctgaaccgagtgccggctgaggaaaccgggccggggctctgtggcctgtgaggacaggatagtctcaggctctcagtgtggcctgcggtggcccctgctgctcagaggaagctcatgaaagccactctttccttctgctctagccccctcctcggcccgcccagcccacgagcgggaagaagagaaagcgggtgagcgatgacgtaccagactgcaaagtcctgaagcctttgttgagcggttccatccctgtggagcagttcgtgcagaccctggagaaggtgagctggtttcgctggtgccgtgaaaactccacacgtggcagcctttccctggctcactatggccccctggctgcagggagtggatgttgctgcttgtcacttagtccccactgtcctgtggcatctgtttggtctaaggtcctgctgggagacccaggagaaagaaagcagagtgaggagtgccccatccttcctcccagcacgaggtcaccagaaggcctctccagactgaagaaaaagctgcttccacacacacatgtgacgagtggggcagggtagtgaggccaggacaaagagggacccggccctgccagagtcttgcacttccacagatgactccttgctgtcagaggggagccaagtctccagtcgactgtcaggatttgcaggaggcagtcgggggaggggacactggcccttcccctctgtctcagcagccctgatggctgcttctcccagagatgagatttcttgactatgattaaaagaaaaaaatctaaccttaaaggttgtaattttggcttcagtcacaggacttcagagatgactttattaggattatagaatctttgataggaagaaggaattggctaaaggtaatactgttcatgctgctgcttgcaagaactgcaacaaattacaatcattacaaggaaggagatttctatgaactttctatccaatgtaaatatcacagttgccgactttcaaatcttaaaggctttccctttcctaggattggttttctccacctgtctttgattttcccgtagggaaaaaggctctggctgggtggttgcggctctcttccaccctccctgaagaccttgcagggctcctgggccctgttaatgggcctcaagctggacttttaaaaacttaagatgaggaccttctgcctggcccagcctatgtcctgacccagtgttccatcccggctcctctctgcagaaggagcaagcacctgtccaagtccctaggggagcctgcagccatgaagtacaggtggcctccccacaccgaggcccttcacctgctgtgtgtctgtttcaggcacatgcctcctttccatgtcacgtctgatttgtaaggaatttctgtccttagcattagcaatagctgagaagtttgcactgctgccttctctccttcactcttgagagggctctgccaagtcccacaggggtatcttggtgtcacctggcattttcctgggagctcagacagctgaaacttaggagggagctgtcaccagggaacggcatggtgcaagcagctgagcgtcccagactcctgaacacagtgcttggacgtgccctcaaagaactcacaaaagcttagccaggttgtggaaattctgttgttttgcatgagcttttgcatgtttagggtctcttttcaagtataagaaactatcactatcataggcctatgactagtctgaagaattgtgttgagacgtgtcagtttctagaaagttcagtcgagtctgtgaagtgtcatttacagatctcacagatgtgcagtctgcccagcccacctctttcttttcttctggagcagcatggcttcagtgatattaaggtggaggacacagccaagggccatatcgtcctgctccaggaggctgagacgctcatccagattgaagaagactcgacccatatcatctgcgacaatgacgagatgctcagagtgcgactgcgggaccttgtcctcaaattcttacagaagttctgagtgggccatctgagctacttccctgaaatcctgcagtccctcactggctgccctcacaagccacctgaggagtggcatgagaggccattaactgtgtctttgtggtgtcctctggcttaaggagtgaagaggtggctcttgagggaaatggtctggacttattcccagcactgtttcaggcaagaactttccctttcaacttcaggctcattttcttctcaactctggctctctcaaggagctggagggtggcagaagtgggacaggagaagttttccaagaggttcatgggaggcggaggtgactggctggctgtcttgcatcagtcccaggcctcggccaggggagccagcctttggtttcgtttacttgcctacagtgctgtacgcaataagatgatgatcccaaaatatggtaaagtgaacccatctgtctgcattttctactctgagcccatttgttaataaacacttatttttatataattagctgtcctctgttgaacctaccatctatatattgatttagtagctgaaaaaatatgaaaatatacagaacagcatgaacttagaaaacaccacaggaaattgaattttgatgtgtatgttaaatcatataatttgcactgtttataaaaacacagatctgtttctccttacattgcataagaaggtgctcacctttaagctgtggctgcacggagagtgatgcaggtcggtacaccagcctcaggctccacctgcaccgcctctcccacagatcctcagtctctgcattaaaccgggcgttactcacagataccctcagagccactggtcgtaggaagctttcagacaaaagtaacctcacaaaagatgactgcttttgaaatgtataaaaccaacagttaccaggtgaaatagcacgagctgtgacacccaggccaactttgcgagtattaagaacaagtcttagccctggcaggcgatgctagatagtatgcccagcgcaggctattcttaaccatcttgttggagtgattgattgattgaaattcactcagaagtcagtcctccaactcggctgacaactaaacagcacacagggatttagtgacccaataaatacataacatgaacagctgcagaactgactgctctggctttatggcgcattatcactcctcttggaacaatcgtattggtgggaatgagtgcttcgctaaagcagggaaaagactacttcatgtttgccatctccaaccttgccaaacctgggcatgggaatgcttaagtaggtttctaattttccaaggtttgggtccactccagtcaagggataggctacagaataaacgagaggcttccaaccatggggcaggactgacattacaagagatgaatgtgccatggctatgaacatttagttttctttttagaattgcaaatagacatcccaagcaggcatacttccaatagaacctttgaaagaatcaagtgaaattaaattttaaaaacatctgagggccaggcatggtggctcacacctgtaatcccaacactttgggaggtcaaggcaggcggatcacaaggtcaggagttcgagaccagcctggccaacatggtgaaaccccgtctctactaaagatacaaaaaaaattagccgggcatgatggcacacacttgtaatcccagctactggtgaggctgaggcaggagaatcacttgaacccggcaggtggaggttgcagtgagccgagatcatgccattgcactccagcctgggcaacagagcaagactccatatcaaaaaaaaaaaaaaaaatctgaaatgcaaaaacagtgtaagctagagctcaggagaaaccaaaaatggttattttatttaaatgtcctagcaatgctatctaggaatgatgggatctgtcaagcctgtctgccgtgaaagggcttgatcagagagcccagtgctggtcccttgaggggggttgcaaaagaagtgagcagtaagaacaagcgagtcagtgggtgcccgatgaacagggtgcaacttagtaggttttaatcaagtcatcaccacccacttagtggcagaagtcagaggcaggaagcagcaaagactcatgctttataaaaagcagagagaaaatccagagccggcctttccaggtatgagaagagcagttatgagtaactgcctaaagttcaggtatttggataccatgccaggttggttagaagactccaaagaagtggcataagtggcagacgtggcctggctctatcagaaatgcggcccaccgacattaactgacattgactgacactgacatcaacctggcgaagactctgacatccagaaaagtttgtactcaaacccagtggaatcctaatgattaattgaaaaaaacttaatagtgcagagacctcatattatttaagtcttagtacaaagtgatatattaggtatctattgcacaacaaattaccccaaaacacggtggctcacgcctgtaatcccagcactttgggaggccgaggcgggcagatcacgaagtcaggagatcgagaccatcctggctaacacggtgaaaccccatctctactaaaaatacaaaaaattagccaggtgtggtgggcgcctgtagtcccagctactccggaagctgaggcaggagaatggcgtgaacccaggaggcggagcttgcagtgagccaagatcgtgccactgcactccagcctgggcgacagagcgagactccgtctcaaaaagaaaaaaaaaaaaaaaaagaaaacctgacttttctcatctcactgtttctgtggtcgggaatctggtgtagtgtggcttagctggtcgaccctggctcagggtctcctctccacacggctgcagtcagctgttgggtgagggaacagagcttaagtaactttccgcagaaccgccagtgagtggcctctgccttaccgcaacaccgtgggtgagtatcaggtcagcagccagccaggaaatggcaatctgtcttttaggccattgctttccaagtcacatctactccatctctcctgatccctgaagagcttgaagcttttggccctcacagttgtcctataaaggcatttccaaactgtaatgaagtatcaacagaaacaagagtgaagaaacctttaaacctgcataatgacatattaacaagagtcaagcaacgagtgggaagggaaggaggacacttttcctctggccctgagtccagtttttttcctgcagccaagaggagtagttaatgctgtctcactgctttatgccatctataagaaggtagacaacacttatctttcaaatgcactgcagtgggactacacataaataacagtagtcttctttgaacctaaaatagagtggaaataaccaatgacaattatggaggaagtcacaggtaaatcctggagaccagcagtgccaagctgagccacagggccattctcactgtagacttgagccagcctccatcaggaactgatcttctaaagatcaaataccagagtctccactgctccttggcagcccattatgggttttaatcacatcataaagcattatatacattatggccaggtacagtggctcacacctctaatcccagcactttgggaggccaaggtgggtgaatcacaaggtcagaagttcaagaccagcctggccaagatggtgaaaccccatctctattaaaaatacaaaaattagccaggcgtggtggcagatgcctgtaatcccagctactcaggaggctgaggcagagaaatgcttaaacccggggagggggcggggggatggaggttgcagtgagccaagatcgcaccactgcactcccgcctgggagacagagccagactctgtctcaaaaaaaaaaacaaaaaaaaaaaccatctatctatctatctatatatatacatgtgcacacacacacacacatgcacacgttaaatgtaaacttttgagacacaggaccacagatctttgaaaggggtgtaaacgcccatctccttaggcatgtagaatatttcttgcttctcttctgttggcattgcaggccattgaaaaaaatgtgcaaagcccccgtgtaatggtgtttgtgttagaaggatttaccctttacctttttctacaataaacattcctaacccatgtgtaagcctccctgatgtagttatcaaatcaatcaccagtaaaaagtaacttaattctcctacaataaattctgagttaccaaacacattatcaattaaaataagtttgctaacgtttccttaaattatccaatataagtttttactctagtaactatttacatttgcttcacatactttggaaataatggactttcatttcacaaagcctttcccaatcatcagtaagcaccttccagtcatcagtgggcattagtcggcagctgctcacatattcggtgtgttgtgccctctctcatggctttagctcaccgtcacagataagcatttctcccagacttacagctagagaggagcacatttccaggaccatgagcaccctgggggcagggtctgttttttccaccttgtcccagcatgaggcttgtggaagaaggtaaggaaagaaaatttcagaaatatttaggaattacaggccaaaacaacatttcctggtgggtcagttttttaactgcaatgttctaaacatgggaacctgcacataagtgtaaaaatccctatcatttagcccatgctttaaaatagctactcgattcagtgggcagcttcctgatgagatgaatcagaggttggtaactgtggccgaaaagccaaatctggcccacaagcagagttgttagaaaaaagatgcaacagaaatcacatgtggcccacaaagcctaaaacactggctgaccctttacagaaaaagtatgccaatccctgctcaagtgctgtgtgtgggaacatttctgtagtttattcaagtaaaggtcaaataatggaatggcaatgtaacagctcccatcagacctgaccctcctagaggtaaaactataaactccagacgtatgtagttacgtaagtaggtagatagaacaacctaccacaaaaaaacaattccattagagattttatcacccttgtaataattattaaaacaactagacaaaaaaaaagtcatagatgacctgaacaaaactgtcaaaaactttgacttaattgatactttttagaatacttgctctgcagcagcagaatgtttactatgaaaaccatatgctaggtgataaatctcattacatctgaaaggaccgaacgcatacacaaaaccttctcccaccacaatggaattaaattcaaactcaacgaagtattttggaaaaccacaaatatttagaaattaaacacttctaaaatagctcatggatcaaagaagacatcccaaaatgaattggaaagtattttgaacagaaaattaaagctcaacatgtacaggatactgctaaagtagtgcttaaaagtcatcttatacctttaaatgcttacagaaaaaatgaaagacctaaacttgatctaaatttttaccttagaagactataaaaagagccaaataaacccaaagaaagtagaggaaagaaatcataaaaataagcaaaacatgagcaaaacagaacagagaaaactaacaaagccaaaagctgattttttaaaacatcagcagaactgatacacacctcattagactgatcaaggaaagacaggaccgactgcccatatgggcagtgaaaaaactttggttatcactacagatcctacggatatgaagaagacagccaatcagaaaggaaagaggggtattactaaagagcctacaaatattaaagggataaaaagaacaccaacttatgccaacagatttaccaccacagataaaatggaaaatttcctttgaagacacaaatagacaaagctcattcaataagaaaaagaacttgatattcacttaagaaattaaatttattatcttctcacaaggaaaactccaggcctagatggtttccctgggaaactatcaaacatttaaggaagaaataacaccaatcttgtataacctctatcaaaaagaggaagggggaatattccagtcccttttaaggggccagcataactctaataccaaaaccttataaagtcattaccaaaaaagaaaatgagaggtaaatatctctcatgaacatcaatgcaaaaaaaaaaaaaaaaacttaccagcaacctgaatccagcaatacacaaataggataatatgacatgaccaagtagggtttatccctggaatgcaaggataattaaatatttgaaagccaatctaatttataatagaatagaggatcatttcaatagatacaggaaaaaaagcatttgatgaaattctctaacagcactcagcagacaggaataaaagggaacatactcaacctgataaaggttatgtatgaaaaacttaacagctcagtgaaatactagagcttttccccaaatattgagagcaaagcaaggtgccgatccatactactgttctatggtgttctcggagtcccagtcattgcaataaggcaaaattgaagaggaaaaggcaggcaggcatacaaacagataaagcataaaggtaggaaagaagtaaaactgttttcagatgagactttttacatagaaagttctaagaaatctagaaaactactggaataagctcacaagactgcaaaatacaaggttggtatccaaaagtcaactgtattttatatattaacaagtttttgagagagagtcttactttgtcacccaggctgaagtgcagtggcacagtcatggctcactgcagccttaaactctcagggtcaagtgatactcccacctcagtttcctgagtagctgggatcacaggcacatgccactgcatccagctaattttttttttctttttacttttatagagacccaccttggcttcccaaagtgctcggattacaggtgtgaggcacaacacctggccagaaataaaatgtttttaaaacagcaacttcattcataatagtgtgagataacttttgaaaagatatgtaagatctctacactaaaagtctcaaaaccttgctgataaaaattaacgatttgaataaatggagaaatatgccatattgatggattagaatactcaatactaacattttaattctgcctattgatttatggatttgatgcaataccatcccagcagacagccacaccacaacctaacccaatgttttaagtaggtaaaggacttgaataaacatttttccaaagatgatacacagatggccaatagcacataaagagatattcaacactggtcattagggaaatgaaaatcaaacccatgaccaggtaccacttcacacctactaggatggctgtaccatttttttaaatttttatcagaaagtaagtgttgggagaagtggagaaattggaaccttcatacgctgctagtggaatgtaaaatgacacagccgctacggaagacggtttggcagttcctcaaaaagttaaatacagaattaccatattgtccagcaactccactcctctatagatacccaaaagaattgagagcagggactcaaatatttggccacctatgttcttagcaatattattcaccaccttagtaaccaaaagatggatgcaacccaagtatccaccaacagataaacagataaaacaaaatgtggaacatacacacaatgaaatattatccactcatagaaaagaatgagattctgatacatgctgcaacgggtgaaccttgaaaacatgctaagtgaaataagccagacacaaaagaccacatattttatgatttcatttatattcaaatatccagaatagatgaatccatagagagagaatagaggttatcagaggctggaagtagtgggggaatgggaagttactgtttaatgagtacagaatttgttcgcaatgaaacagttttgtaactagctagtggtgagggttacacaacattgtgaatatacttaatggaactaaattgtacacttcaaaatggctaacatggcaaattttatgtttaaatttttttaatctgataatgccaggtttcttagaagagactgggcagtattgagatgaattttatgtaagcataagagctaatgtacaaaaatcacaagcattcttatacaccaataacagagagccaaatgatgagttgaatgctcattcacaattgcttcaaagagaataaaatacctaggaatccaacttacaagggacgtgaaggacctcttcaaggagaactacaaaccactgctcaatgaaataaaagaggatacaaacaaatggaagaacattccatgctcatgggtaggaagaatcaatatcatgaaaatggccatactgcccaaggtaatttatagattcaatgccatccccatcaagctaccaatgactttcttcacagaattggaaaaaactactttaaagttcatatggaaccaaaaaagagcccacattgccaagtcaatcctaagccaaaagaacaaagctggaggcatcacgctacctgacttcaaactatactacaaggctacagtaaccaaaacagcatggtactggtaccaaaacagagatatagaccaatggaacagaacagagccctcagaaataacaccgcatatctacaactatctgatctttgacaaacctgagaaaaacaagcaatggggaaaggattccctatttaataaatggtgctgggaaaactggctagccacatgtagaaagctgaaactggatcccttccttacaccttatacaaaaattaattcaagatggattaaagacttaaacgttagacctaaaaccataaaaaccctagaagaaaacctaggcattacccttcaggacataggcatgggcaaggacttcatgtctaaaacaccaaaagcaatggcaacaaaagccaaaattgacaaatgggatctaattaaactaaagagcttctgcacagcaaaagaaactaccatcagagtgaacaggcaacctacaaaatgggagaaaattttcgcaacctactcatctgacaaagggctaatatccagaatctacaatgaactcaaacaaatttacaagaaaaaaacaaccccatcaaaaagtgggccaaggacgtgaacagacacttctcaaaagaagacatttatgcagccaaaaaacacatgaaaaaatgctcaccatcactggccatcagagaaatgcaaatgaaaactacaatgagataccatctcacaccagttagaatggcaatcattaaaaagtcaggaaacaacaggtgctggagaggatgtgcagaaataggaacactttttacactgttggtgggactgtaaactagttcaaccattgtggaaatcagtgtggtgattcctcagggatctagaactagaaataccatttgacccagccatcccattactgggtatatacccaaaggactataaatcatgctgctataaggacacatgcacacgtatgtttattccggcactattcacaatagcaaagacttggaaccaacccaaatgtccaacaatgatagactggattaagaaaatgtggcacatatacaccatggaatactatgcagccataaaaaatgatgaattcatgtcctttgtagggacatggatgagattggaaatcatcattctcagtaaactatcgcaagaacaaaaaaccaaacaccgcatattctcactcataggtgggaattgaacaatgagaacatatggacacaggaaggggaacatcacactctgggactgttgtggggttgggggaggggggagggatatcattaggagatatacctaatgctaaatgacgagttaatgggtgcagcacaccagcatggcacatgtatacatatgtaactaacctgcacattgtgcacatgtaccctaaaacttaaagtaaaaaaaaggaatatattatgaaattataaaattgaaaagaaaaggagctaatgccatagaactaattctaaaatttacagagaaatacaaagtaactataatattgaaagcaatcttggagatgaacaaagttggaaagctgcattcatcaagaccgtatggaactggcacgaggatgaacaaagcagcataacaacaaagatggttcagaaacagagccccacttctataatgaccaccttttcaacaaagggaagggaaagtctttttaacaaatggtgctgcaatgcccatatagaagaagtatcagaaacctgaccactgccacacaccataaacactgagatggatctttaattataagagctaataccataaagcatttggtgaaaaacactgaaaatatcttcatgatgttgggtaggcacaggtttcttgggtcacagaaagtagtaacaagagaattgtatctcctcaaaattgaaaacttctgctaatcagacgacaccatacagaaaatgattaggcaagccacaaattaaaaaaataatttacaaaacatatctgacaatggactagtgtccagcgcaaaaaattcctgtaactcagcaataaaaaagactaaatacatccatacgatactattcattgagaaaagaaactggttatcaaaccgggaaaaagatacaaaagaaccttaagtgcatattatattacatgaaagcagccaatgtgaaaaggctacatgctgtatgattttatgtgacattctggaaaaggccatagtgtgaaaacagtaaaaagatcagtggttgccagagattcagagagggagggagggaccaataggtgcagcacaggaagtttttaggggagtgagactgttctgtgtgagactgtaatggtgaatatatatcattacatatttgtcaaaacccatagaacatacaacacaatgaatgaagcctaatgtaaacccatgggcttgagtgaataatgtgtcaacactggctcatcaattgtatcaaatctatcacactaatggcagatgttaataaaggacaagtgaggggtgaggtggaagaagaagtctctttgtacttctcatgcagttttgctgtaaatctgaaactgctccccccgaaatctattaaaaatgtaggaagaaaagaaagcaattcaaaaaaggacaatccagtttttcttaatgggcaaaagatgtgtacagataattcacaaaggaaatatatataaatggcgtaaacacatgaaaaggtgcttaaatcaccagtcatcaggaaaacgcagaatgaaataagacaccattactcaccagaatggctaaaattaaaaagactgaccagaccatggatcagtgaggatgtggaactgggagtctcataattactggtggaagtacacaatggaatgatcgcattgagaaaaggtctagaagtttcttacaaaactaaacatgtatacatctaccatattacccaacaattccactcctaggtatttacccaagagaaataaaaatccacagaaagacttgcacatgaatgttcacagaaactttattcataatatccaaaaactggaaaaagccccagtacctatataatagaacggacagattttactcaattcatacaagggaatactaagcaataaaaagtaactaatcaccaatctattcagcaacgatggatgcatctccaaaacgttatgctgggtgtgtagaagacggacacacacaagagtagaaattataggacaccatttatatgaaattctagaatatggaaaactaatccaaaatgaaaaaaaccatcagcattggctatgtctgaggatggaggacgtggggactgactaggaggaaggagcaggaggggactttctgggttgatagtagtgttccatatattgagaggggtctgggttacacaggtgtgtgcatttgtcagaactcaaaagaatgcacactgaagatgtgtgcattacagtgtgcacgtttaaaataaagtttacattaaaaacacaaacattgacctataatgaacagttgtatgcccatgtatttagaaggaaatgcattgatgttgccagtttactcagaaatgtacctcaacagtgcaccatgaaaggatgaatggcaggatgggtgaagggacggggcatgggtagatgggacgctccaaggcgggtccagtaaaatgacatagacatttatgccctagaaatgatttcaacattgccgtatgtttgaaatgtgggaccagtcgtttaaatcaatagaatgtaagtagtttcaatgctaacatgacagtcctacaacaggaccagcagctgtactttttttttatttttatgagacggagtttcttgttgcccaggctagagtgcaatggcgcaaatcacagctcactgcaacctccgcctcctgggttcaagcaattctcctgcctcagcctcctgagtagctgggattacaggcacgtgccaccacacctggctaatttttgtatttttagtagagaaggggtttcgccattttggccaggctggtctcaaactcctgacctcaggtgatccacccgccttggcctccccaggtgctgggattacaggcgtgaaccaccgcacccagcctgtactctttcataaacgtcaagacagatgaagaaaggtaaaacaatttgcctaagctgtgatttctaagtgaccctcttcactttgtcaaagcattcattcatgagaaaactatggaactcctgtgttcttgagaggctgcagtccggtgtgggaggcagagcagtggccagcacacagcatggtgaggcgacagagcgtgggggctctaataggaggtgagcagggcactcagccaggcgctggcgctcaaacctagtggaaggcagaaagagccatgaagaagtggacactattttactccagtaatagttcatttttattgtgtcaaacagtggactctacgtatattatattatttaacttttaacatatgcttaagagatgggcacaacttttgccaccgtatggtgggattagagcctaaaatagtaatagataacttgctctccaccagtgtgatgggcagcccaagatctgcacccagtctgttccagggcccagacctttacccactacattctcctttcttcttttcagtatcttcataacattctaatttttttgtagagatgggggtcttgctatgttgcccagactggtcttgaactggcctcatgtgatcctcccacttctgcctcaccaaatgctgagattaagatgttaggcaccacacaccaccatcaacattcttcttaacacatttttgtaaaccttgtggagccttccacttcagtgatgatcccatcaacagctaacatttaccaccttggcagaccgtaagtccaagacacaactcgacaggtatagactcaaagcagacatcatatctctgtgtataggaagacacattttctacagcctcatgccaccttctcaagtctctctggtcccaggacaatcgtaacatggagatggatggctggaagaacaggagcttgacagccaaaactccagacccaaagaggaatgcccctcgatgacatctcacccatcagctgctgcaaacttgcctgatcagtcgtgaaccccacttgaggagggacaccaactgttaagtctcacccattcttaggactgtcagtgtgaccaaagctgccacctgcagagcccaggagaggagtcctcgcctttaccccctttcccatctccatccttctccccgaagcccacagctcagtgccctctcctgaggaagcctctgatcccacagccaagcacaagatctaggcctgtgggcaccaacaggatggggctctgcagtcagggagcgtcagctcggtgcaggtacaggtgccttagtgacctataggtcaggggcatgacctatggaccgaatcgagccattcacagtgaggcctcacctgtcctgggatcgcaggcacacacagctccccacaaccactacacacacacacacacacacacacacacgcattttaaattcccatgaaaaaattaactttgcatatatgggccacatgcccttccacatcctgcttaaagcacctcaacagcccctaagttcctgttttgtcaaaatgacttgccctggaaccgggcacaggcaaggctgcccatgtgagtgtgagtctgttcacccatctctggtccacagcccacaccagggcctggtcaggctgcctcccatcgtcttctgcgagcaggcccagctggcatacacaggtggcgacctggaatcaagcaatcaagcaggtgccttctctcaggtcactcttccatacttgctgaggaaaaccacaaaagacctccaagctgcttgagttaaagtctccatttatttttatttttttacaaaaatccaatgtaagaccattgtgctcgtgacgaaaaggggtggggtggatggacgtggcatggatatcaaagcttccccccacaaactaggagctccccactctgtccggcgcagctcccagaaagatcccatccttccggacaggaccccagctggtgagccctggcctgaggcacagtccacacggaggagcactgcccagggagccagcgctcacagtggcctgcagagccctgggacggtgttatggtaagacagcccaaaccggagcagcaagccggccacccagagaacgaggcgctcctgcaccctgcgagccaggacaaggtggccaggggcggcccacagacagccaaggagacccggggtctgtggcgccgctttcccatctcaagcgagtcacaggtcggcggctttcccgtggtgagaagcacctgaccagtgacactgtggccaccttgctgcctctcgctgaggagggcgtgcccctcagagcctgtctgcagtccttcaagccagtgttcctttcagggtcaaggagggctgtccttgttggaagcaccggcaccacagccctccctgcggcatgttttggtgtcagaccactcagcccttcttagatccaccagtgacattcggggcccgacaacctggctccactaaagggagaggccctggctccaccacacagacggccccagctcactgagtcccgctaaagggggtcccaccacacagacggccccggctcaccgagtcccactgaagtcagtatgtgagttcctcacattaaaagaaaccagatgaaatagcagccacaatatagcgccacacaccacactctttggctccccgagggaagaaggctactgctaaaaggaatacaagtcaggagtcaggtagagggcaactagaaagttctgaggaagggcgtctgacccccactgctgggaacataaccacactgcctcagcaggggagctacaggctgatgctggggttgggggcggggaacctttggaaacacagtcctggcggcggccgggtccggtttgccaatggggagagttcccttaagccgagctagccctacaggtgggtgggagctacacaaaagagcccagcttcaaaacagtacttgaagaggacccacgtggtacaggcaggtcagaggagaacgtattccaagaaatagaagcacaggatgccaaggtctagggaagacggaactggcttaaggcatgtgcatgaccaggacaaacctgagcttttgttcagttgctagaaaacttccagagtcaactccacttccagaaagtagggttcaagaaacacgtcatgggctaaatccctgacaaatgccactcacaccctcctaggttcccctactgccaccatgacccaaaaaattagcttatttcagtttcagcccagggaacagaatcctaagcagggagtggaaagtggtaactcgggttgtgaatgcccgttagattccaaggctggatgtgagcttacacagcaaatcacagcctcccattgttctagcacataccaaacctcggggagtcctacagccaagctgacattaggggtccaaaaaccacagataacacaggatggggctccagacagaggcggggggaaggtgaatttcaccaaggaattatcccaaggcaggcgccttgctgtaaaacttcccggccagccgggtgggttcctcgaaggacactggcttgctctacactagggagaggaggctgacctgcaaaccacttcagaccacagcagatgtgcacgctgctgatctcctgtccaatccaagaaagagcacttcagaaacgcctgaggcccacagcacgtgtgtttcaacagaagagcaggatagaaagagccatctgggagtggcgtcttcagcccctattctttctcactctttgcttcctcattctctctcaaacaagagagaaatgggagagcagggataagtacggaggcaagcctggcctaaagataaatcctcaaaaatcgctggccccagcagcaggaagctgaacagcccaccagggtcaggcgctcccagggattcactgggaagagaatgtgagttacaggttgctgactggcaacagaaagggtaaggaagagaccttgtccaggcccgcaagagggccaagttcatccctttctggttgctgcacacagatggcgctggggaggatgggagatgatctttaaggataagccagtgacacaaggccaggacccatctccgccagaatacagaacaaaggagcctgcgcggtccctcccttagaaaggcaaaactcacactcccccagccaaaaatatatatgtatgcaagtgtgtgcatgtatttatatacacacacatatatataaataagccttgaatggcaaatctgaaactttctctttttaaataatcataatagttgttattgaatgtaaaaaccacgaaccagctgtcctgggcgtacgaacggtgtgagtgactctgcagagtcgccacagtcctcagtgtaagctatcagtcagtgccctgtgtggggaaccccggggactccgcccagggctccaggcccagtgtggctgacttcaagataaaggcagcggtttccttccactcctcctgctgccccttccagcagaggctctgggccacccaccagcagatgtgcccaaggtcctgcaatgcctaggaaccttgggagccatcttcctccctctgctcatcctcttccccagaccgtgcgctgcccctagatgaacttgaagcacttggtcttgtcatggggcaggcgtgtcttgaagagcacagaatccaccctgaactgcgtgtacaggaggggcatgtagccgtacaccttcacgaagaagttgatgcacttgtgccgctcgtggaagtgggagtcatcatgagacagggcctgagggcatcctgggcatcggaatgtccaccgtgaggtcacctggaaacgggagagagagacagagtgggaatcccagctaatactgacagaacccttgcagctgagccgatcccacactcccatgtccatggtgaagacgctgatcccctcaggggcaacatccctgcagagcatggcaggaaccagagcccggccccaggcctcctgcctaccagatgtctccagaacattgtcaggtattctgttgagatggcctacgcttctcagatgccaaaagccttaacgtgtgtagtgtcagctgtctcagtaagtctactcctagtatgtacttggttgcagagccataggtaggtaccgagttgtttgtttcatcaatgttttgaatcaaaatattgaagactacccaaagaggggctttgggtattgaagactacccaaagaggggctagtcaaagaggggctatcattcttgaatactgtccataaaaaagatgcttaactacatttaaagccatgggaaagtggccatactacagtctagtcatattattattaattagaaaatgtctaactaaaaaagtatgaagagggacagcttcattacaatgtggcaggccgaatggcataaaaacccctcagaacacctgaacatgcaagaagaaatacataaaccatctctttaaatacagggcagagcctgtaataagaaatgaaattacctggtgattaattccagcactttgggaggccaaggcaggaagatcgcttgagcccaggagtacaaaaccagcctgggcaacaaagcaaaacctcatctccacaagagataaaaatattagctgcgtgtggcagcaggccagctatctggtgtagtcccagctacttgggaggctgagatgggaggctgcttgagcccacgagtttgaggctgcaatgagctatgatggtaccactgcactccagcctgggtgacagtgagaccctgtcactcactcacatacatacatgcatgcatgaataaacaatgaataatgaatgaatgaatgaatgaatgaatgaatgaaatcctcagaggccaaacaatgaaaaagcaaatcctgcaagatagccatgaacttgggttttaaatgggctggagaagtgacacctgcaaagcgggctgggggcctttggaaacactggctccatggaggggagcagggaggggtggacgcctcacaaagaaagatggggaagaagtgtctttaaatttatcttctacttccttttcttttcacctaagtctgatctttttatcccatttcactgaaatttaataactatgattctcattttcaatagttccatttagggctttccaatctgtttgttctttttggagtgatttgttgcttttttatgttttcaggttactaattttaagcctacttgttttatagtctatctaatggctttattatttgaaatccttggagaactataacctgtttgttatatgtgttcactcctgctcatgatcagctgttttcttggtggctgactgttgactttacatttcaagctcatcttcaatgaggctttacctgtgcgtgtcctatgtgacctgaggtgaagaaatttctctttttcttaagtgggaacttcctctgctgagagtaatttctccttataacagatttttggttttattttgtcaaacagtccaagggtatcgacgactgggtctagttttcttttttgttttttccctggggactccccatattgcccaggctggtctggaactcctggcctcaagaaatcctcctgcctcagcctctcaacatgttgggattacagacttgagccatctcatgtggccctgggtctagatttcatacagaatgagtccctaagcccatggaggctcaaaagactatttaacattctcaacctacacttccccaacaacctgtcagagtcaaggttaaaataaacaaggtatgtgtcatctccccggggcaacgggtaggagatctccattctaattctccacccttaacaggctctacactccttcacatgagtgataaaatccaagcctctagacaactaaggtgagagcagccccccatggtggcctcagtgatgccaccacgcttgccaccctaagttttagtcctcccacctgcttcctttctggcaattctcttacctttttattagctcaactatacactgaaaaaataagtttgttacttatagtgatcaggttttcaaactacctaatccactatagtacaaaacccaaaaatttactgtcaagtttttttttttttttgagacagtctcactctgtctcccaggctggagtgcagtgcggtgatctcggctcactacgaactccgcctcccaggtttatgccattctcctgcctcagcctcccgagtagctgggactacaggcgcctgccaccacacctggctaattttttgtatttttagtagagattggttttgctgtgttagccaggatggtctcgatctcctgacctcgtgatctgcccgcctcagcctccccaagtgttgggattacaggcatgagccacagcgcccagcctactgtcaagtttttaaaaagcagactgcaaatcaagtatataaatttaaaatataaaaataaggccagatgtggtggttcccacctgtaatcccagcactttgggaggccaaggtgggcggatcacttgagctcagtttgaggccagcctggccaacatggcaagaccctgtttctactaaaaatacaaaaaaattagctgggcatggcgacacatgcctgtaatcccagctgctgtggaggcttaagcaggaaaatcacttgaacccgggaggcagaggttgcagtgacctgagatcgtgccactgcactgcagcctgggtgacagagcgaggctccatctcaaaaaaaaaaaaaaaaaagaaaaagaaaaaatacatatatacgtatttttacacacatatgtgtatatatatatgtatgtataaataaataagtcaccacgatagacaggataccagagaaccaaaagaaataagccaaaagttttggtacttttgatttctttctgcatgtctatcttttctcaaataatttttaaatttccattataaattaaggggaaattttttaattgaaagacacatcccataacttaatagtggaagagtaatcattgtgtacagccagtatgcgccgtcagagcccaggtcccagagtttaaactgggaggagacacaggccagtgctcaaagggtggctcccctcagaaccgagtctctggacagtcatgacctccacaggtccccctccagggtcccacctgtctcctcacttctcccctcactcactgctgctctcttagaacccttcggggtcacgtcagcactgagttattgctcttccacggttcccactggagcaggatgtaggggtcaggaatctggggaaggatgttctcaaacagcatctatgtccagtattccatggggctctcactggatctaaaaacctttctcatcattccagacaccagaatccaaccccaggagaaatgccctttaacctgcacattattccatgtgacacaaaaggtgactttataactgttgttttcacggaagcagtggtttccaaatgtttttaatcatgtaatccatcagtaaaaaaaacatttaagctgggtgcggtggctcacacctgtaatcccagcactttgggaggccaaggcgggcagatcacgaggtcaagagatcgagaccagcctggccaacatggtgaaaccccttctctactaaaaatataaaaattagcggggcgtggtggcacacgcctatagtcccagctactcagaagactgaggcaggaaaatcgcttgaacccgggaggcagaggttgcagtgagccgagattgcaccactgcactccagcctagcaaaagagcgagactccatctcaaaaaaagaaacaaaaaaccatttaagactgcatccccaatatatttgtaaatatataactgtgttacataataaaacatgcaaaaaatttaaaaagaatgaagcaactataatattaactgaagtctggacatttacttatttaaccaatatcgtggatcacagtttacatggaagattccaggtaactcaatctaagaaaaatattcgttttatgcttagtaacaatgaggaaaatccttgatagctgccaagaacctatatcaccccagagaaccaagacgttcacttgcatttcggcttccttaccacctaagccatctgttttctcaaaactttacaggtgacttttcaatctcttatcctgaatgaagcctatttatattctgtgttctccttgcaaaagtagtacattattcaaagaaataatatgacattaactccccattcgttagtcaatattaagatattaacattattgaaagaacactgccaatcatacgaagcagtcaaacctccctaactcaaacaaggaatagtttgacagtaaaaatttgaggtatttaaagcacaacaaaaaaattactatttttgaacataaaatagtacatatacctgataccattaaaattaggtaaataaaatatttaattcaaactggttctttattatgaagtaaataattagattcataagttgaaggaattactaagagttagaaaacactcttaatttcagcctttgaatttgaaaagtcatcccaatcttgaattcttcatatattccagaaagatgaagaaaattcacagagaatactcagttttgaagttttcacttggtaagaatcatgtgcaccatgtctaaattacttccacctgcactgaagagatggcttaactaatgaaacactggcctaataatgcagtagacaaacacactttaacaaagatgaaaaattccccatgtctgtgcctgctcaggtaactgatgctattattaggtacctaatcactcagatactttaaattttcatggaccatgtcttctggtctactagagaggcataaattgatgcatacatcttgactcaagtccagtccctggctacataagaaaggatatataaggaagagaaaattgcacccatcattaattgctttctaaaacctttgcctccctacctcaaagtctacaaaatcttttcactgtttaatatgagacctaccactgtacctggaaaacatactgtttttatataaatacttgtgactatttttcacaatttaaaaaaattgatacattatgttgctaattattcttctcttgtgaggctttagcagaagtctcggcaacagatgaaaccctgggacaatcaggagtgacatcctacgcaggggccacagttggcctccacatgcatttctttgttatgctttgctgcatggaaccagcgtcctctggtggccaccctgcttagcactcaagctacgacttctttctcactacaatgcccaggctggagtgcagtggctattcacagacacgcccatggcacattcagccttgaactcctggattcaagcaatcctcctggctcagcctcctgagtagctgagactaccaggcatgtgccactacacccagcttctaaagatgatttcattatcgttattagtacatgctggtgggtacttagtctagaacacaattattattattattattttctttttgagacggagtctcactcagtcacccaggctggagtgcactggcatgatctcagctcactgcaatctctgcctcctggattcaagcgattctcctgcctcagcctgctgagtagctgggattacaggcgcatgctactgtgtgtgcgtgtgtgtgtatttttttttttttttgagatggagtctcgctctgtcacccaggctggagtgcagtggcgcgatcttggcttactgcaacctccgcctccaggttcaagtgattctcctgccttggcctcctgagtagctgagactacaggtgcgtgccaccacgcctggctaattttttatatttttagtagagacaaggtttcaccgtgttagccaggatggtcttgagctcctgaccttgtgatccacctgcctcagccttccaaagtgctgggattataggcgtaagccactgcgcccagcctaatttgtatattttttagtagagtcggggtttcaccatgttggccaggctggtcacgaactcctgacctcaagtgatccgcctgcctcagcctccaaaagtgctgggattacaggcatgagccaccgcacccagtcgaacacaactatttactcatggcaatgtcacccatgaaggtaaacctatttcataaaattaaataatatgcctttttgataataatgaaaataagacctcattagtttgttgacccttctaaggacatcaggtataaatctcttactggaatttagcattttcttcaattatgaaacagacaaacacagacgaagcacagtcacaaatattcatttggagtgacagattctatagcattattggttctaataacatctgcttctgtgaggactgagctatcctaacccttaccagcatgctctaacttgctgacagagcccacaaagatgacaggaagggggtggaaccaggctttctgtgcactgagtgtatgtgttaatacctccaagaaaaaaacacaacaataccctcagaacttctagaattctgagggtatttttggttgtgagcaaataatttatatagtacttatgtgccaggcactattcttagagctttacatatattaactcagaaattcttaagttttttgtttgatggacatcgcctgtgcctctggcttggcaatctggtcaagactgtagactcctcaaagtaatgtttttaggtatataaactacaatacacaggatgacaaaggaaacgagttacagtaaaacacagtgacatacatgctcttttcttaatgtattaaatcacaacatctaggggaaagggagtaactgccgtgaattcaaagcagtaacaaatacaaacaatactttttgcagatattgcaataaaggtattgtgatatgaagatatcagtgatttctactggtgacaaatcagttactacaaatactcttatgaattatagcctgtttcataactgaagaaaatgctttattccagtaagacattaataaaaataatgatgcaacatctttcccacccaagttccaaaccttctgatttctatccattgcccttaggaatgaagggcccctgtagtaacaactcatttaagctcacagacaatcctttgatgaggtaggtagtatcatccctattgtacaaatgaggactctgaggtacagtgcagttacgtgctgcactactgcaaaacaagtgaagtaaacatgcacgcatccacagccccaccagtggtgggacctcaccttgatggggggcttccgagtgatgtgggagacaaggaagttcatggcaatgtcctcacagttgatgtattcatccaccatgtcccggatggcctggggcatcacataagaatacaggtaggcataatactgtcaggggaagaaaaagaaccacatgctgtgttacaagacacaggttgttggctttcagccaaaatatgcatggatggaggggctgtttgggtgtggcagtaactaggaggtattactggcacttagggactggggcaggggattcgagacatcctgtcgtgtggatcttctgcagtgaggaattatcccattcaaactgccatcatcaccccctttagtaacagaatgtcatatcatctccctggtaccgcagtgattttgaaatcaatacaaagatttgtcaaactaggtcagatgctggttcaattgaacactattttatctctaacaatggccaaaaaaaaaaaaaaagataagtgagagaaaaaagcctggttattttctcagacctcaataaatcacagaaccatgaaacacacgatccctcactgcctcctgtacagattcttgagtctggtcagtactcgccatcggccctggctactccctgctgccaaccaccttcgtctcttgcctggattctccacatcagctcctaaatattctccctgctgccatattctcttccccatgtgctagtcccagcgcagcaggtgattgtgttaacactcaaaccaactgaacatatcaccccttcgctccaaagcctccaacacttcccatctcactcagagtaaaaggcaaagttctcagactgtcctacaaggcccacagaggggtgtgttggagccactcacacctgctcatgaatggcgctttctacattttcagaatgttgtcagcttgttgttaaacatagccattattaaagatgtaattacataaacttcaaattaaataaattaaaattatattaaaaatccatgcaataaacaccttaaactcattacttcctagttaatattttactattaacttgaggttacctatatctactgttgatgttgaaattactatgtaatggtgtacaactgtgtatctcttcccaaatccgtgttcagtgactcatgttgataacttcaaatcagccaaggtaagagtatttataccatagaaatcagcaaatactacaagacagggcacatgttaactgctatatgttgcaatttgctgtaatgaacaaatgaataggtgaggtgcccagttaaactgattaactgatgaacatattgcattacctacaatataatatgttgagtgaaataatgataaaatttttttgtaacacagaataaatgtgctaattatcttatagcaaagtacttaagagttggtgaacttaaaaaaatgaattgtaattttttttttaacaaaaaggtgatccaggctgggcatggtggctcatgcctgtaatcccaacactttgtttgggaggccaaggtcggtgaaatgcttgagcccagaagttcaaggccagcctgggcaacacagggagaagaccccatagctacaaaaaaataaaaaattggccagatgtagtggcatgtgcctgtactgcctgctactcaggaggctgaggtgagaagatcacttgagcctgggagttctaggctgcactgagccatggttgtgccactgcaatccagcctgggtgacagtgagattctgtctcaaaaaaaaagagtaagaataaataaaataaaataaatacactttttaaaaaaggtaattcaaatttattgaccctttaaatggccagtgactgtccttcgtatgctgatgagaatatattaacataacacgtcttgaaagaaatgacattttaacaataagaactgccttttaataataatttaaaaaaaactgatgaaagcattatcagaataactgttcagaggtatttccatcagtatgtggttttgctgtcaaaaatgatttatgttgaccaggcgcagtggctcacgcctataatcccagcattttgggaggccaaggcgggtggatcacttgaggtcaggagttcgagaccagcctggccaacagggtgaatcccagctactggggaggctgaggcagaagaattgcttgaacccaggaggcagagactgcagtgagccaagattgcactactgtactccagcctggagaaagaagcgagaagactccatctcaaaaagaagagaaaaaaaaaagtttaatttagaaacagacctgacttgctataacacacagtatccaatcaagattttcaaaaataataaaacatattcaatcctactgctttcactaaaatttaagaattgagtgatcacattattttaaagttttgtttcatcgttatttcaacctctaaaaaatatctatcagtaatatacacatgcataaaatttataagtaaatatacatatatattaggtacaggtctaaaaagtgttattgacaggcacttatgattttaaaaaaaaagaaaaaaacttgacagctgttgatcagagaggaccaatctaactgctttcgtggaccaagcaagtaagacaaatgagtgtaaagaaatgggtgtaggccgggtgctgtggctcacgcctgtaatcccaacactttgggaggccaaagcgggcggatcatgaggtcaggagttcaagaccagcctgaccaacatggtgaaaacccatctctactaaaaatacaaaaattagccaggtgtggtggcatgctcctgtaatcccagctactcgggaggctgaggcagaattgcctaaacctaggaggtggaggttgcagggagccgagatggtgccactgcactccagcctgggccacacagcaaaactcagtctcataaaaataaaaaaagaaataggtgtaagaaaaacgaggagccacaggcaggtgagcgcatgaaggccccatcatgggcctcaactacaggagcagccgccatgacgccccagacaggacctcagaggacctgatcttcatttgtattgcagctcaggtctttttgtgaaatcttgtgatttttagaagttgtcagtgcataggacaacactagagggcccaaaaatctctctgtaagccaactgaggtttgggcgctgctagtctgtaatcttctttatagattttcacacaggaaaaatactaaatttcattaagtaaatgatttcttgaaagtagaggtacctgaccattcatggttttaaagaacagtctgaatctgggaaggcaattcagaagataagtacatcctcaaggtatgagtagacgctgctaagatcagtggctccttcttagctgagcaagtgtgaaaatcttggccagttgctgacaccctaatcctctgactctacttgcaatcctcagtccaaacaaggcccaccgaaggaaaggaagtcctgaggtgaagtgcaagaatgggatgagtgtatcaacttcacacattaagtttttaaaagaaaaagaacagctgaaagtttaacgactgcttaggctggttcaaacgtccctatatgtcaggcacggttcctcacatctgtaatcccaacactttgggaggctaaggcgggcagatcgcttgagtccaggagttcgagaccagcctaagcaacatggcgaaactgcatctctataaaaattaccaaaaaaaattagccaggtgtggtgatgcgtgcctgtagtcccagctacccaggagacagaggcaggagggtcacctgggcccaagaggtggaggctaaaatgagctgagaccccaccattacactccaacctgggcgacagtgagaccctgtcttaaaaaattaaaaaagtccctataaaaatgaattttattgttctatttgaggtgactggcaagatgccaccatctgagatgggagatatgtaagggagaaaagacttcaaggagctagggagagacggtgagctttcctgggaaaagtttacctgaagtgtctgagggacaaacgggagatatgctggaaacaatgaaatatacaaacgcagacctcagcaagaaaggccaaggctggaatacagatgaggaaattaccagcctgcagatgctaagaaaagcctcaaaaccttgtgtgtgagacagaacgcctagggaaaataagaagagcaacagaggctagaccccgggacacttcaccattcatgcagagagagtggtgggagggtcttccgtgaggacagtggaggcaccagaaccatggagggcatggatgcagacaaagagaaggaggcaggtgccaccgtctttggtgactgtcagggcacgatgaaaaggctggttgatggcagcaagacagacgacaggagctgcaaatgagactttatgtgacagctgggagggaagtgtcattggtaagcaatgaaaatgttccctacacctgccctgtgccaaagcacagatgtggggaaatgagtgcctcaaagtctacaggaaaaggctaatgggagcactgtcctcagagaagactcagggcacagaagaggtgctctgtgtggtgggcagtgggggtaatgccagggtaatcttagaacagggactcctcagggcccgggaacacttcaggagggaggtagagagcggcactcacggacacagaaggcaaaccacatacagcactgtaaactttctagaagctacatcgttaaaaagtaaaaagagacagtaaaaatcaataactgtatttaacccagtaatccaaactaactgcatttcaagatgcaatcaacacaaacaattactgagctatctgacaccctttgttacaagtttttgaaagctgttgtgcactttacactgaacagcacgtctccattctgaccagtcatgcaccaggtgatcagcagccacttgtggtcaggggccactttacaggatggaagaggtagagagggaagatgggccaggagaaaaaaacagaatacagaacagtagaggaggaaagactgcagggtcctaagcttcagatattcagtgaaaatcagattaggaggcacagtgaaagtaataagcactaaagcatcacaaagaactggcagagccacacagaggctcatcgtggggcccgggacaggcatggtatatctaagtcagaaaagtgcccaggtcaccttctgatggctgggccatatctagggtggcagtgttaaaactggaaggtatttgaggtgtcttttagcccagtgccctcagttttacaaacggagagccaacgcccagaaagataaagtggtttccaaatggcctatgtgcaactgtacaggcagccctctcatcttgactttttatcccagagttgctctaagcatcttgatcattgtctgtaaaaatagaaaaaactgacttctagcacaaaagaaacatgtaagaagcgttaggagagctaagctgagggcagcattccgctaccacacaaaggtgaaactctcaccaagtcgatgccattattaccagctttttcttaccttgtgaaagaaggcagcacctgtcagcaccatggacagctcacaggagtagttggagttgtagagccaggactgatgggggatgtcccatgcgtggtaacggccagggaagcccacgatgcggtcccgagcttctctccacacccttgaaaaacacaagtgcatacacagacctgaatacagagctctagggtcatcagaagtgttcacagttattgcctccaccttacaagctctggcccttaggcttttacttctcgtatcctttcaaaataaaacaaaatcaacaacaagccaaacaggataaaagcaaataaggtatcatattcagcttccttaataagcacctgcacattgtccctctagcagtcagcatcctccagcccttccagaaagaataagccctaagtttggaaaggggatctccagaatggggtatgtacaatatctactaaggagggctccagaatggggtatatacaataatctactaagcagcagaaagatgatatcaatttcaattctttttttagcttatttaatttccaagaaagggcttggtgggatggctcatgcctgtaacctcagcacttgggaggccaacacaggaggattgcttgaagcaaggagctggagaccagcctgggcaacatagcaagatcctgtctctacaaaaaaaaatttttgtttgtaattagctgggtatggtggagcacacctgtactaccagctacttgggaggctgaggtggaaggactgcctgattctaggagttcaaggctgcagttagctatgattgcaccacctcccttggcctgagcaacagagcaagatctggctctaaaaatgaatgaatgaacaagcattttctaagaaaggctttgtttttaataagcatgacatattagttcagaaggacatgtatgtaatttacatatattgcacacttttcttttacagagaaggaacataataaaaaggtttagagagcactggtttaaccacagaagactactgaactgcaccactcctaattccaaatttgagcagggctgacggagaaacatgtatgatgagaagtggcctacagaaccatacaactgaaaggtttcattaaatggaagaaataaatggagacttcagtatgtttcagtagaaacttctatatcatctccaaatttataggtaaattagaacaaataaaattggtccccagtttcacaggataaattggagaactgaaagcgtttaagctccacaggacctgacaggcctgcagaaaggctgccagagatttaaactgcctgcaaactccctcatcacttacatggaacttcagttcctaagacacagaagattttatttcaacagagttcctctcctaataagtctagaagcatctaatctaatccaaaagaggagaaatcacaacttctatcacaatgtaacagccttctaggtgggtttttttagacaactgattttttttaaattgtggcaaaacaaacataaaatataccatcttaatcatttttaaatgtatggttcagtggcattacggacattcacagtgtcgtgcaaccatccctgccatccatctccagaactctttcatcttcccaaacggaaactctgtccccattaaacactaatccccactcccaccttcccacagcccggcagcccctattctactctccgtctctatgaatgactacctaggggcctcacataatggaaccacagtatttatccctctgagttgtttgcacttctgttacaaataacgctgctctggccatttgtgtattcctttctgtatggacacatgctctcaagtctcttggtataccttttctgtcccttatgattgattgtatctgcctctttcttggctacctaagttgaagtgagtcaagatctatctttgccagaagaaagaattcttagacttaccctttcctttgaacttaggtctgtttcattcccattaaggtgaaataagcaaattggggagattaataagagaaaggttttagatcaaaggatgcccaaatgcatgagaaaagggtcagggtaggaaaaggttaggatgtatagacagcaatgataattcaccagctccattaccagaggctaaatctcaaacatgaatgacagttaagagacacattaaaaggcttcccattattctctcaccacctgcaaatctgctggaaaatagcacgggcaaggtaagaagtccctaaatcaggggcttggaagctatgttaatgccagctatgttaataggcttcaaactccttaaagctgggctccttatcaaaatcattcttggatctaagggttggcagttctcctgttaacactccacgactatgctcaccacgccagtccttcggcacgctccaaactgcatcacgctgcagcataaacacactccctaccgcccacccccaccactaccacctgcagcagcaaagatcatgcctggagttactgcatggcttttttcctttcataaaaacaagtggagagagtcagctacttattatcgtgtaaaaaaaatacacctcggtttaccaggattttttttttaatcacagctgtcaacagacttggttcaataatacactaagcaagaggtcaaaggaaatgtgagaggctgggtgggggagaataagaacagatgttctaatttttcagaaatgtgtcaaatcattctttacagatggatttaagacagatgagcaataaagcctctgctccttttatctgagcatctgctcttacaagcctaagccaaaggcagctccagagccaggtaggtcaggttaggccttcagtgaacagaatggaagcacagagaaagaactctctctatcctggatccacacttaatttgaaaaagatcgccaaagaaatctactccagtgttttttttgttttgttttgttttgttttgttttagctctgttgcccaggctagaagtggcatgatcttggctcactgcaacctccacctcctgggttcaagcaattctcctgtctcagcctcctgagtagctgggattacaggcgcacgccaacacgccccgctaatttttatatttttagtaaaggcagggtttcaccatgttggccaggctggtctcaaactcctgacctcaggtgatccacctgccttggcctcccaaaatgctgggattacaggcgtaagccactacacccggcctccagtggttttcaaatgatgtggggaagaactaatttttccccaaaattattatagattaatactttggtaaaatacaacaaaaatgaactgcctggtttcttaaatatgacatccaaagcacaagcaaccaaagaaaatagatccactgaacttcaaaacacgaaccctgtgcttcaaataataccatcaagaaagcaagaaaataacccatggaatgggagaaaattgtgcaactccaatcactgataatggacttgcatctagaatatataaagaactcttataacgtgataataaaaagacaatcctggcctggtgcggtggctcatgcctgtaatcccagcactttgggaggccgaggcgggcagatcacctgaggtcaggagttcgagaccagcctgaccaacatggtgaaaccctgtctctactaaaaatacaaacattagccaggcatggtggcaggcgcctgtagtcccagctacttgggaggctgaggcaggagaatggcgtgaactcgggaggtggagcttgcagtgagccaagatcacaccactgcactccagcctgggtaacagagcgagactctgtgtcagaaaaaaaaaaaaaaagacgacaatccaaacaaaaatgggcaaagaatgtgaaaagccgtttctccaaagaagatatacaaaggctaactgatcaataagcgcatgaaaagaagctcaacatcattgagagaaatgcaaatcacaactgtacggccgggtgctgtggctcatgcctgtaatcccagcacttgggaggcttgctcgaggccaggagtttcagaccagcttgaacaataaagtgagaacccatctgtacaaaaaaaaaaaaaaaatgtaaagattagccaggtgtggtaatgtgagcctgtagtccccgctactcaggaggatcacttgagcccaggagttcaaggttaccacatgctaagattgcaccactgcactccagcctcagcaacaatgtgagaccccatctgtgtgtgtgtgtatatatacacacatacacacacacacacatttatatataaaattagttatcactttacaatgactaggacggctataaattttgaaaatggaaaataacaagcattgacgaagatgtggagaagctagaaccttcatacactgctggtgagaatgcaatatggggctgccaccgtgaaaaacagcctgaccggctcaaaatgttaaagcagctatcatgatccacccacattactcttaggtatccactcaagaggaatgacatgttcatacaaaaacttgcgcatgaaggttcacagcattattcataatagccaagaaatagaaatgacccaaatatccatcaacagaaaatgaatgaagaactggtacctgggctgggcaccgtggctcatgcctgtaatcccagcactctgggaggccgaggcgggcaggttgcctgagctcaggagttcaagatcagcctgggcaacatggtgaaaccccatctctactaaaatacaaaaaataaaattagcttggcatggtggtggtccatacctgtaatcccagctactcgggaggctgacatgaaagaatcgcttgaacctgggaggcagaggttgcaatgagctgagatcaagccactgcactccagcctgcgcaacagagtgagactccatctcaaaataaaaaagaactggtacctgctacaagatggatgaaccttgaaaacatcatgttccgtgaaagaagagagtcacaaaaggccatgcatcgttgtacagttctatttatagaagatgtccagaataggcaaatctatagagatgcaaagattgagtggctacctaggactgaggggtttggagaaaaattgggagtggctgttaataggtacagggtttctttcagtggtgatgaagatttctaaaattaaccatggtgatgtttgcacaactctgaatatactaaaaccactgaattgtacacttaaatgagtgaattttatggggtatgaattatattgaagaaatgttgcaaaaaaaagaactgcaagaaaaataatcatatacttggatttcatagtaaatgtcaaattgctttacaagtttctgaatgcttaccctcaatttttgtacttacctcaccattaacaggtaacaaactgtccctaaaccaacatcccagtccctgagatacctggagtagccttcatctactccatcctcttccctgcagtgaccctcaagtgggatccttcagcaattcctaagactcaagaaggcaggagagttgaaggccgggtgcaggttgggagtgtgacaaacctgcatttgaacccagagctctgctgccactttctagcttctacgtggttctgttctcttctatctcaatttactcctacatgaaatggagacagctacaatttatgtcatcaaattttagaaggatgaatgagataagacaaagtcctaggctagtccctggcacacagtacgggttcaacatatgtttaccatcatcatcatcatcatcattaccaccacctccttttcctcctccccttctttttccttttaaatcattgcttctgacaccctccttcccccaaatctttttgggtccaggatcctggcactgttccattgctccaacacacagcaacatgtcacttttgccttcccattcctctaaaaacaaaaccctcctatttcctttagagaactaccctacccgttgcctctactctctgcccatgtggtttggatttaaggatgatacacctgcagcaccaggaacaggcaggtaaccagggtctagccaatcaaagaattccaccttcctggccacagaggaaaggcctgtgggaacacagagcggagcctacagatgaagagagatggactcctccaacgccatctacgagcctgcatccagccacgtcctacatcagccctgactatctgcaaggggttctcagttaccatcagccaaaaaattcattttgcagcctaatccaggttttctgtcacttgcaacctaaagttttgattggaaattagtctctcaccggaacccaaacatgatttcgtcatggcggaggtgagcatcgtcatcaatggacaggatggcctctgtctcaatttcattccagggtaagaatcggttgttcaaactgttcttctcagtacggaccacctgtgatgaggaaggaaaaacattaaaaattaaggctgtgttatgaaaggccaaacaaaatctgtatttaggtccaaggagaccatggctggatttactgaataattttgcctgatctccgcgcttgtaaaatctagcatatgcctttcaggaataaaagctgccttatacttcaataaatgtatatagatttaccttttaagcttcattcattagttagctaattttcttgtgaatcaagcaaaagctgaagattattttatacacgcaataaacacgatgtagggaaattaaaaacaactctcccaagagaacacaaggtggcagagtggatctgagattccaatggctatggaattcccagcatgcttgttaattttaaaacccaactcagaaacctcatgagtctgtcacttctgactccccaattctaacgcctttttgggatataaatcccaaaaaagagcacagcccatctggtcgagattagttacttcacctttgaaattcctacctacaatgctgactactcgtacacaaactttttccttcttttcaaggtatcatgtactcaagtacaacagcttctgcgtcttcagcaaatcccaattcaaaacacatctaagtgattcaacatacatgcaaagcagtatttccttcataaaacagaaactggtgcttcaaatagtacaactacataatgaaacaatttttatttaaccatatctcagttaagtatagtttacctacagtgtgggtgagtagctgtgttattcaccttgccacctaatactcatataaatgatgaccacagccagtacttggatggctcattttattcttagagtgtctttgtctaattagtccaaccaaaggggaaccattattttgttctcaaaccccaaaaacaaagagcatctcatgaagaataatctttttagaatgccacgaaaaatcaccttacttccaacagactattttacttgtactgagaacaacctctacctggcatgatgaattaactgcatccgaggacttaaatttatgaatggtttccaaggagctctgtgacctactagcatgtctcttcaacttcaaataccttctcttccatcctccccctggaggtccagttcagatgcctcttgccacaccctccttgccaggagaatcatttattctatattcttaatgcagagccctcatacttcaattaattcattctagcacacttaaaatccaattaattcagagctagaagggctttggagactatagcgtctgtcactttacacatgcagaaactgaggcccagagtgatgtcatacaactggcaagttgcaagagccaaaactctaattcataactttaaaaaaaaaaaaaaagcgagttctcgaagtctcatcactatgttccccccaggcgtctcgaactcctgagctcaagagatcctcctatctcggctccgaaagtgcaaggattacaggcatgagccaccacacccggtcctaactcatactttgattccaaacccagtccttttcctgataaacttttgttaactttataaacttcttcaaaccaaagccaccatagaaaatgcttttttttttttttttttttttttttgagatggagtctcactctgtcacccaggctggagtgcagtcgcgcaatcttggctcactgcagcctctgccctctgagttcaagtgattctcctgcctcagcctcccaagtagctgggattacaggcgcctaccaccacgcctggctatttttttgcatttttagtagagacggggtttcaccatcttggccaggctggtcttgaaatcctgacctcatgatccgcccaccttggcctcccaaagtgctgggactacaggcacgagccactgcgcccagacattttttttttttttttttttttttttgagatagagtctcactgtggcccagactggaatgcagtggtgtgatctcggctcactacaacttccacctgccaggctcaagtgatcctcctgcctcagcctcccaagtagctggaactacaagcagataccaccatgcccagctaatttttttatctttgtagagacagggtttcaccatattgcctaggctggtctcgaactcctgatctcatggcatctgcctgcctcagcctctcaaagtgctgggattacaggcatgagtcaccacacctggcctgaaaatgcattattaatctgtgtaccatcaagaaaaaacaatgttgccaattaagaaggcatgtgaaattgatgatcccttgtttacttgattacagaacttaaatttttttttcttttaagagatggagtcttgagttgtcacctaggctggagtgcaatggtgctatcatagctcactgcagcctagagctcattagctcaagtgattgatcctcttgtctcagctccccaagtagctgggacctacaggcatgcaccaccacacttgggtaatttcaaaaaaaacttgtagagacacgttctggctatgtagccttgactggcctcaaactcctggtctcaagcattccccctccctcagccttccaaaaaaagtgacaggattacaggcaagagtcaacactcttggccagagctttctttaagacttcacctcagccccagaggaggtcctgcccaactcaagacaaagaaggatctgtaacagattcaccaccacagttaacagatgtccaagccaagcaacagaccgagaaatccaccttgccctgcagcatgtctgaccagcataaaaattcccaagtgtacagcccagggtatcctaagctcagagtccacaatgacaaaacgaaggaccgagtgaggcctaggtcagacgagagagcagcaaggagagcagatgccaagtgctcaccttagcagctgtcggttccactcgccaaagggcgggagggtggcaagaaggggccggacttgaatggcaagctcagcaatggtaagaggccatccattgtaagacacatctcaatttcagagatgacaaaatgtaaaataaggtccgccttggaaatgacggcatatggtagctgttcacaaactccctcaacaaactcccctcgaacattcactttacctaacacacctagcattcactcagtacagaactgattctgccaattcagccaaacaaagctccccctcacacagcttaaaatgaagaaaaaccacttcagttcttgaatattggcttgtagattatcagttttgtgggttaaccttcaggtggattatctacggcacaattagtaaaccaggaatatagcaaggagcttcagagttcaaagtgtgaggcgaagaccagcagcacacaccaccggagcctgtaggagtgcaggcacaccccaagcccactgagtcagaatctgcattttaacatgcccctgggggattcctgtgcacattaaatggggagaagcactggtacagagggagaaagcatggctttggggccaatcagaaaagcttgggttcaaattccaactcctcctcttactagacgtgtgaatgccagcaccctctctgctaaatcaacatagcaccacactgtttgcaaaatctgaagttacttatcagccaaacttgacaatcctataaacaacctaactctgcacctgaaaacgaaaaacaagaaaaactacaatgatttgatatctagatcatatccaaaattatctaatttacaaacaaccaaatcaagagaacctacttgtgctttagaagacttaggtggggtcatgcagctggaggtcaaatatcaaagtgttttggcctagatttcacactagttttttttagtaagtttattaaagtccattacttagatatcaagaagcaacaagagaacaactactaaggactccaggaacacagggcgcctgccatctctgctcaccctctgagcacaactgctctgggctggatgacaacagctgttcaggtatagcaaactgcattttaacaatcagaacagcaatcagaataaaagggccaggcatggtggctcacacctgtaatcccagcactttgggaggccaaggcgggtggatcacctgaggtcaggagttcaagaccagcctggctaatatggcaaaaccccatctctactaaaaataattttttaaaaatctagccaggcatgggggagggcacctgtaatcccagttactcaggaggctgaggcaggagaatcgcttgaacccaggaagtggaggttacagtgagccaagattgcaccactgcactccacgctgggcaagtgattccgtctcaaaaaaaaaaaaaaaaaaaaaagaaaagaaaagctgttaaagattcacagaaacacaacaccaagcactacagttttgtcagttagctgacaaaactaactgcagtcagtaagtcagctttaagaattcagagcagtggttctcaaccaggaacaattttgcctcgggctacatgtggcaatgtctgaagggatttttggttgtcacaactggagaaaagggtgcgctacttgcgtctagtatctagtgggcagaagccagggatgctgccagatcctatagtgcacaagacagcccccacaacagagaattatctgacccaaaatgtcactgtgccactgctgaaacaccctgatttagagtcaacctgcaggaagacagtaaaccaaaacagcacttggaagactaactatagttcattacctaagatgttccccttttccctatagccgcaaaaagatttctgccctcacaaactttgcaaacgccaactaaaactaaatgggtggaagagtaaaagttttcttctaacagttttgcttcaaagctgcagtgcttaatggctaaacaaaagctcagcaaaccaactattatccattctggcaccaaaatcagaagaacagaaaggctcaaacatttctaaatgcaggccgggcgcagtggctcacgcctgtaatcccagcactttaggaggccgaggcgggcggatcacaaggtcaagagatccagaccatcctggccaacatagtgaaacccagtttttactaaaaatacaaaaattagccgggcgtggtggtgtgcgcctgtaatcccagctactcaggaggctgaggcaggagaattgcttgagcccgggaggcagaggctgcagtgagccgagattgtgccactgcaccacagcctgggtgagagagcgagactccatctcggaaaaaaaaaaaaaaaaacacttctaaatgcagactcacagatcagcacggcctctaagaatctgagaaaagacagatcgaacataaaagaaacaagtcaaccagagggactgtgtcatatttaggaaaggttctcatttttgttgatgttgttttgtttcaaatcaaaccaacactcttccctcaaccccacaatactggctatttcttcatgttactacagcatattgctattagatgccttatgattacatcttagtaacttgcaaacaggaagactcactttcaagtgattgctttaattactggtatgacattaaccaaaatgaatagaccacagtgcctggcaatatagcagatgttcaacaaatgttttataaatgaatgaatgggcagaaaatagaacataatttagccctgccattctatttacagaatatgaaataaagacttgagaagtttctagatcaaaattataggtaaacattcaatatctttaataatcttaaagaatgatagagaggaattaggaaacctcttagtatttagtgtagttttctatagcaaaaaacccatccacctccatcaagccaggagcaatgcccactctttgcttggcctgtctcacacacagggctccctgacggtgcctcgctagctcttctgcacaatatcattcacgggacccttgaccttctcctatcacaaaggaaaagggacagcaatcgtggcctggaacctgccacctatgaaatttggccatttaaatacacttgaaatgccccttttcagattacatccggcccagccaagcccgacaatctccatcctccaacaaaacatatatacgtacataatacatccctatagcaaatccatatctgagaatgaaacttaacatcaagccatcacacaggcaagaaaggaaacagcaactgaccttagttctccatcatccccttcctccaacttaaaagaggaaccatcagagaactcaggaatgaggaaaatgagatccaggaagaggcacacagtcatgcccacccagctcaggaggacctaggtaacagagcttgaagtgagtggggagggaggtgagcgatgggagggaggtgagcgacagagagaagatgatagaaagaggactacatcatcatcatcattattattattgagatggagtcttgccctgtcacccagactagagtgcagtggcacgatctcggctcactgcaacctctgcctcctgggttcaaacgattctcctgcctcagcctcctgagtagctgggattacaggcgtccgccactgcacctggctaatttttgtatttttttttctttttttcttcttcttctttttttttttttaaagcagagacagggtttcaccatcttggccaggctggtctcaaactcctgacctcgcgatccacccatctcggcctcccaaagtgctgggattacaggcgtgagccaccacacccagccaaggactacattatttaagggattcattcaataaacgtcaagtgatggggcagaaagcaagaaaacgcaaaggaagaaaagagaataagaaggtaacagtgcattggttttccatttataactttacacagggatgtcatacagtacaaacaaaattgtacatgttttagatgagacaaatctgttttaacttataagagaaaaagttgccaatgatcccagtgcaagtgcaggtaagaaagcctaggttagcaggtcaacaaatgagagaatgcagataaagaccatccacagtgcctagcacacagaaaatgcccaaaaactgttaacaattattataacatgatattagcagtctctattttaattttcatacattttacatgtatatttcatattctgtatgtattttaatttttatacattttctatattttatacatatctttatttaaaaaaacaagtttgtgcttctccaagaaatttacacgtggaaaaaaaaaaagaaaaaaaatacatatctattgtcagaagtcctaagacctggtgctggtggtggctcacacctgtaatcccagtactttgggaggcagaaatgggcagatcacctgaggtcaggagttcgagaccagcctggccaccatggcaaaatcctgactctactaaaaatacaaaaattagccaggcgtggtggtatgcgcctgtagtcccagctacaaaagaggctgaggtacaagaatcacttaaacctgggaggtggagactgcactgagccaagatcacaccactgtgctccagcctgggcaacagcgtgagactctgtctcaaaaaaaaaaaaaaaaaaaaacagtcctgagccctcattctaatacaggtatcagttagtcaagtgacctgaagcaacagaattcttacagtctcagattccttactttgaattagtaaaaagagtacacatacactaagaggggaagacattacctcaagaatcaatttgctgcaattagtaaattatgcaacatgactttccagcaattgctttaaacttctgtatttcttagtattcatttttggttcggggtagccttgttttatataattttcctttgcagccatacagcccattcgcaaacagaaacccacagctatagccaccaagttattaagtaaaatgttgtcaaagagaaagaccaaccacccagatgtgccagctcctagtgaagtgcaccagaccttgcacagtcttggacctggagaagctggacaaggtttttcctgctggcttcacctagctatcacaattttaggaaattatcgtctcattcgttcaagggatatttttaaaagtagagtgggcagaaataaaaaaatacagcttaccaacactttaaggagtaagccctgagaatgatctccactctcttgcctgaggtctagccagaagccaagcctcttagcctgagaggcggagtccccagccagaaagttcctgacgccaagagtgcactacggatgcagcttctcttccagtcttcccttttccctaatagactactggggagaggatgaaaataactcccctggaatgatatttatattacccaaaaaaagaactctccctgttcaatttgaatatcaagggctgggacagagggaaaagggcattgaaaaataataatcttgtatctctcttttttttttttttttttttttagagacagggtctccctctatcacccaggctggagcgcggtggcacaatcacagctcactgcagccttgacttaccaggctcaagcaatcccctcacctcggcttcccaagagcctggattacagacatgcatgatgcctggctaattttttctatttttttgtagagatggggtctccctatgttgcccaggctggtctcaaacccctaggctcaagcagtccacccacctcagtctcccaaagtgctgggattacaggcgtgagccactgcgcccggcactatcattttcatttggaaaaaaaatggtgcattctgacctcatcacttccacagagaccttgcagtctgcaaggatgtgtgctatgctgatctctgaactggttctctctaccaccgctcctcgcctaggctactgcaagtctttttgcttctgctcttttccccatagttccataaaaatcatgtgcctcctctgctcaacaccctccaagggcatcctaaggcagacaggataaaacccagacttcctaaccacgacctgcactgtcctgcacctgctggtcccactgccttctccaacctccttcaaacgcgccacccggatgcactgggcatcgcttctggtgcttgccattccccatacatccctccagaatttacatggcctcctctctcgcttcattcaggcttctgctcaaatgtcaccccttctaaaagcccccttccaaggcaccctgcgtcaattagccataccctttatgaagaagagaatgaaaacctaagactcagggacgggctgccaagagactgtctcagcagtcagtgagtatacagtgtgaagggaagtgatgccttgagtgagctagactacactgttagtaaatgaaagatgtccctttcctaacagcccacatgttacaactccaaaaggacagactctaaaacagccaccctacttactattttccagagtataaagcagagtaaggaagatgtgtaaactggtcagaataaagtagtaactcaaaccaaaatttttaatgggactatctatcaagaagggattacttggcatttctgcctccagaagagttcagtaagcccctgccagacccagtcctccctcagatgacaactataacctctgcacaaaaataccaaaaaaagaatttccagaaggcactagagagtgaacaaaagacaaccaattatggaggggtgctaaaattcagagggagggaattactgacacagggagaattactgttgctttcaccctgagagtaggccagagttggtaccaagaaagacagctaaaactctcatacaaaacccatggtctttctggcctgtaaaggaaatgtgtaaggtaaccacagcctgtagaaagaatggagaaaattccagacaggagaaagccagagagagggagctccaagttctgcgtagaaactgctctgtctctggcccacccctaagccatgcatgcttggtgcaggctgtaagcagaccagctacatataaaagaactcaacatgagagtggccattcacgagacagggctttcagtctgagtcaatacagctaaccacctactaaaacaaaaatatcaacactttccagaataaaaatcaaagaaaaccatgctaaggcataccacagtcaaactgctgaaaaccaaatacaaagaaaaaatttcaaaagtagccagagaaaaccacaccttacatataaggaaacaaaaatttgaaaaccactgatatatcctcagaaacaacggaggcctggaaacagtggaacatctttcaggtgccatgaaagtggtggtccccaacatagtggagagtttttcaaaaggctagacctcaaatcccttggcataataatactctctagttggctttcattagatatctttgttgttatgctccaggagctaagggacctgatccatgtgtttacaaaatatacaagagcaagggagagagcagacactcaccatcgcccctctgtttggtagtcctaccccattcaacgggagacccacttcaactggtggcacttctcccatctctctgcaagtcctgtctccttgccccgccaccatcccatttgtgctgaagttctctttacacagagcatttcaatcaggagtgttcaagggtggtggcaataaagatcaccttcactctaagctagatctttttatgcaaataattatttaaaagaatgaggaattttaacatataagtcctatggggcacccctaagacaatccttctccacttaaaatagctggggctcaatacacttcacagcccacaaacacccagcacttatgcctgttgcttagtgggaacctaaacataagaggagcccgtattgcccagcactttctgaaatggcacggaggttcctgggtagattcactgatgcctgggaacaaccctggtgctaaatttataaaaattaaccttagcgtattgaattggctacgtctacatctagaagaaaaacccactctgaggtgtatcacagtagtgccctttttctatagcagagagagctaccagtctctttctagctctgatagctgggtacatccgagatgtcagcaacttcaactgttccccagaacacccgcctctcctagatagaaagcacaaccacaatatttacaggatggagtgaaattctccatctgaagctatttcctcttttttaaaaggaccagaaaaaaaacttgtattgctaatatgagaaagctgtttagaatagcctatctgtaaagtttctggcattttccaattaggtattattgcgatgggctgcccaatagtcaggactacttatttcccatcagagtttttaaaaaaagattcattctggtaagttcttgatgaatttcagtcaacttaactggtatggcaccagcttctctacatccctatcaaaatcaaagaaaactcaggaaaaatggaaaacaatggctgctctattattctactatttgaggagcatctatctttcacagagcaaatgctttcttaatttcaatgacataaagttgtaacagaaagaaaaaaagtgaactttgagaagtctattaaaaaaattccctatttacaaaacttaatatacaaaatacactgggataaaaaggatttataaccctacagtctttgaatagcttctaattataaattcaattaaatttaaaaaaagattagcagcagtaagaaaaaatttaaagcaaagaggcactttgcacagaaggaagtaggcagtaacaactatgacacaaacagaaatgatgtagagaggatacaagaagcctttatgagtgaagtcagttaaagctgcccagagcataggcaagacaaacatactggcttccatctcctttaacattaagggataagaaggaatcaaataagtgagcacctttctagaatccttagttgtcttatcgtagtttcctctttaatgctgagatcaaaaaagctaattatcaaagatcacgaaatgactacttaatcccaggtctgtatcactccaaatctcatacttattacaccatgctgctgcttagaaaaataattcaaatgaattggcctcccagtgaagtacattttttaaaaaccgagacttctagcaacgtgtggcccatcagactttttgctaccttctgccaggaagtaactacatatgcagcaggttaaataggtggcagtctgcttaagacctgctctaaggctgcacatttaagagagatggtcgccatctctctcctagaatgccaagtttaattctgaagatggtaaactcctcagaactaaagccctgtcctgcatatttagctattatttttcctgtaaaatacagcacttaaccatgagatggagtaaagaatgagaaagaacctacaagacaccctggaaggttcaattggagttggttctccaactccaaaatatcaaaccccaactccagtcttccaaaagacttctatgaatacctggaaaatgacacaggccttcctaaaccctttgggaggtgactaaagctgccgcttctggaatcagacatactaaagctcagcttctccattactcaccatgatcttgggcaaattcattaacctaagcttcagctcccatacgaataagctgaagaaacagcgataatatgtcacaaaatgcttattatagtgcctagaggctaagtgcttcctaaatggtagcttatcattatcatcatcatcttgttatgacatggaagtctacgggataaccgacaaggttttgtatattgaatataaaatcagtttcagttttggggatcctcgatttaggaagtgagtaacagccacagaactgccaaggcttgaaaaagcagcaagcaaacccttcaggaagaaaggaatctatacaggtttttcatgagtatgcatgtattctcctctgctagaagttacgattgctaaagtgaaggaagttggaaaagggattaagagtgaaatactatttcatgcaccaaaacgaactgttcgtttctctattaccatgatggggacgccaatgtcaggccacagaaggtcctctgatggcagcttgggagaattccacaccaccacgaccttgttcaggtaagggaggccattcagcctctctaaagagttcataagcacttcctcccgctcataagtcaacatcaccaccgtgaactgctctcggggaacattgcctccaagcgctgcctgaaattccttgccagaacccccagctccaccaccaataggccgaaagccagtccctgagcccaagaatttggcctctgagggcaacacagggtcaaagggagtgtgggggaaaagatggaaaggccctggagcacagttccagctgcggtaaaagtcagtgacagtcagagtgaaattgcggaggtatctgggtgaggcgtagggcggctccgtctccactggccccaggtccaggtccccgttgtcagccatgttggggtcagttccagccgccttgcctgaacggtgggggatctcagctgccgcctcttcccggatgggagcggctgggatctggatgcgagtcctaatcatagccagcacggtattaaaaatactgtcagcagtggagaagtaagtctcccagagaaagcggccttgccgcctcatagccaggaggtcactatcggagaggcttctgagcaggaaatgaacctcggtaacacgaggctttggcaccaccagggccgcctcgttccactgcagcatgtcctggtagggaagctggacctgctcccccagcaccaccgggacggcaccgacttccagggcttcgaagagccgtgttgcacacccagaggaaataaccaagcgagggtccccgggggtaatgatgagggcgaaggtggagagcttcagcaattccaagcggtcctcccgctctccacacagtgcccactcagttggcaggctgggtttgggctggtttttgcaggtgaattccaccaggacctgatccagcttgctgtcctgcaccgccttcagggtggcaatgatccggtcatcgtagtcggcgggagggtcgccctccatttcctcttcgaaggagcgggcctcctgaaggctagacctcagagactcaatcttctcgccctggaaggtgaagagatatttccgcttcaccggcacctgtggtgggatttccatgaagttgggctcagacatggcatggaccagcggtgatacgaccaagtcaaagccaggtctgtactggacagtgtagaaggtggactgggccaccatggcacggccagtactgacgttatagagaaggttctgtgtatctgacttacgtgacagattgatgatgacatggttgtgtccatccgtccgccagtgtggcagggaatacaactgcttctccagctcagcaggccgcagcaccaccggctcctgcatctctcccactagtatcacgtaaaggcaggcgatgtctgcattttctgtaacataaacgttagctcgtgctgtcgcctgaaaagcctgcttgaccaagggatccaggtagctgccaaagacaaactggtcactgtcatagacgtagaccgggaagccagaggtgagagggcaacgagaataatcaaagcagttgtgtagccggcagccccgagtggccttcgggggagggaggccggcatcgtccttctctgggagcagtcggatgggcagggacagcttgggctggttctgggccatgagctccttgtaggaatgctcggtctggctgatgacattcttgagctggagcaggtcctgcttggcgttctcaatgctcttcttacaggcttcgatcttcagattcagcttggcgatctcgctgttcagctcttggcgcttggcctccagctgcaggagctcttcactcaccgactcccggatgcggcacagatccagcacgtgcttcacctcgcacagctcgttccccacccggggaccaaaaatccgcttgcctgcctcatcagcctcatccagagtggtgaggtaatagtgggcgatgagcgggaagaagaccaggatgacaaagagcgtgaagctgagccacgtgaggcggatgcggttggaccagcgcagcatgcaggtctgacctccgttccccgcgcccccattccgcagcatggtatagcctgtcatgagtcctctgcagcctgccccccagatcacgtcgggtcactcgccataaccatgggttgctattccacaaaacgatctctgtttcactgacacgtttccagaagagttagtgtgctccccagacaaggcaccaaataaaatgaacatttcattttcctcagctgcagctgaaatggtctctgaccctattccagcagattttaagttctggctgttgaccaaagaacatgtccttaatctttatcaaacgataaaaggtgccacattcttgctgagatgaaagggaggaggtacctgatgatgaaacccaggaaaaacaccctggaatcagacagactttttcaaatgccatagctcttgtttcttggttttgctgaccaacaaatatgcatagtgtctattcacagttatacagtaataggttagaacagaaataaatgccagcttcttatgatgcctttgccaacaatcaggcctgcaaaagaaagagaaccatgtcagtcttgaagaagttatgttcaacacccctgccaccatacatttctagaaaatgcttaaatcttagatggaacaatggctggaacactggctgtgtctcaaagaacattataatgacaatgcagagatgttgtttgctgtttggtataggtcttttacttggggtaataaatggataagtgccccaaaaagctgcagtttacaacccctccccacttcttatttaactggatctagagcggcattatagccctgtaacacgatgaccaactaaattcatgggacaaagatgtccatggtcttttcttatcctgttccacacctgggcatcatctttagatgaacagaaataccttcctagccaacctgggtagtttatgtttattcctaacctataagtcttctttggaaatactttacaaaaaaagactctgaaaagctcaatttgttaaatgtagagttgaaagggttgaagagaactcttttgatctttatccagtagtagatgcagtaatcctgagacaaaatgtatttcccagtttgcttctcatttatcttccattagcagacatcatgtgctctttcttaaaatataaatagtaacttgctcttttagaaagaacactatacttagaaatgagaggcattcgttctccttctttgctgacagatttgctatcagaccttggtttcctaatcttctaaaatggagataggtgcacggagacggcaatgcaccacgttgctgtgatacaaagtgcagtggatgggaggacgcttgtagcgactcagtccctcagcaacactcccagccctgctctctcaccaagcttcactgccactggctgcagaggcttgccacttgctttccctcaaattcaacacagctagaaacaaatcataatattctatgccagggaatattcccggtttctttttttaattcttccaaaaaatattcaccatactcttaacagggctaagacatgctaagtataactgtgggagaatctagggtgtataatccttgacctcatggaacttcccttaccctaagagataagatataaacaaacaagggtacacgtagcataaaatgagtaggacttcacagaggcacaaccactttctctagcttctacctctgtcaaagatgtttaactattaaaggtgtaatagtcttctctcctttttaccatttttataaacataattttaattatgtttcagaataaagattcctttaaacattctaacattttttcaagtaacatttgatttcatcgtaacattggacattaaattttaatctgtcaataaattataataacaatttctaaagacaaggggatattaggctgggcatggtggctcacacctgtaatcccagcactttgagaggccgaggcgagcggatctcctgaggtcaggagtttgagaccagcctggccaacatggcaaaaccccatctctactaaaaatacaaaattagctgggtgtggtggcacgcaactgtaatcccagctactcaggaggctgaggcaggagaatcgcctgaacccgggaggtggaggttgcagtgagccgagatcgcaccattgcactccagcccaggcaacaagagtgaaataccatctcaaaaaaaaaaaaaaaaaaaagaaagaaagaaaagaggatattagaatcagctaacagcaaagaatgagaggagggaaatgatggtgtgagtcactttgtccattacaaagaacacctgacaagacatcagacctaaagttgatgataatattactaaaaggtttaagtatttggataatctaaacttggataattagcagctgaccaaatactcaaatttacattatccttgtgattcaaatgtttaaatctcttgctttcaaaagaatcttctttgcacttatgaccaaattgtaacaaagaaacaacagaatggaagaaaaagaaaagaaggcgtaatcacagcaatccagctgactcattccttcctcaccatgtgtttcaggacccttccttcctctgacttgtgtagcattacacctcagcacacgacttcttgaaagagtgaacctccagggcttgctctcctgatttaaaaaaaaaaacaaaaaacaaaaatagaacagtgacatactattagaaaaatactcaatactgaaagtgctattaaagaacctatttactgtcccctatgaaaagatttctcttatgtacatgaggtcaccaaataatttactgtccaaacagagactctttgaagtggaaagggagactattaataaatacactgggacaagaggtatacacggggactctggcaggcaaaccgtccagacagacgttacctatttatgtgctctaagggggaataaaaccaaacactaaaatatggaaaagtccttacttgttgaaagtatatactgagatatttacagatgaaatgatatacctggaatttgcttcaaaataaacaggatgagggtggcggggaatgtttgcgggtagaaatgaacccaagatcggccgtgagctgactgctgttgacactgaatgatgggtacccatgggggcttattatatcaggctctcttttgtctaagtttgaaatttttcataccaaaaattctaaaagatactacatacagagtctaaacagaggttattaaaaagtcatttggagactgactatagttagtctaatatttctagtgctaccaacttacatataagcagagctgagggcagaaacaaatgttctcacagaaaccaataattcaacaatgattcaaaagaatgcatccccactaaattcccatctcttttactggagccaggcaaaagcatcatccatgtccaatagcatgagcattccttcctaaacagctaattaaattatttcaagcacaaaagaaaaaggataccctcagaatctcttctgtcattctctggaaaatgacaataaacatatcagcctctagaaataaatgtcactgaaacaatgataaggagcccttcagattttttttattccatatacaatgtacatgtctaattcattctcagtcacctgccacagcatttcatgcttaacttgccagctggcctccattcctgcccctacaatgcactccatacacagcaaccaggaccatcttgaaacatgagtcaggccacgcctcccctctcaatattttcaaggctgcccactgtactgccgggctccccagacccatctcagttaccatcgctcttccccttgctctctcagcttcagccacactggcctcctcttacctcctcgactgtgccaagcttctcgctctcaaaactttatgcctgttttgtctgaaatgttcttccccaggcttctgcctggcagactctttctcatccttcaggcctcaactttcctggcattaccatttaaagttgcctttcttaccccccgatgctctctggcaccgacccactgatttacttcctaatatcttgtaatttattaattccctcccttccccaccaaagcctaatcctcgaggggaggaaccctttgtgtctggatcactgctgcgtggccagcacccagcccagtgtccagcacactgtaaacactctataaatatttgttaaataaatgaatcctatcactgatcacttcctcatcctacaaactctcaattctcccctggacttccatgaagctgtgtttttttagtgttccatctacttccctgactcatcctccctttctgctttgctgggacccagtcctcctacctcatactgaaagtgttccccatggctctcaacataatgttaatgaatccattaacaaataatatattgtattgaatacattataaactacagagagagaacttcagagccaggaggcagctggatggccatatggacctgcagctagactacccggctcaggatgcagctcagccttgagaatttgggaatgttacataatctccctgagctcatttcctcctttgtaaagtgagtctgaaaatctctacctaccgccagggttattgcacaaattaagtaagatattatagatggaagaaaaaaaaatgggaacatggctaaaacagtgctaagaggaaaatttatgcataaattcttgcattgaagaaaagtctcaaatcaataacctatgctcctccttcaagaacccagaaaaaaaacaaaacaaacctaaagagcagaaatcaacgaaatcgaaaacagaaaagcagaagagaaaaatcaagaaaacaaagaggtttgtcactggtttgaaaaacctacaagaatgacaaagaaaaaagggaaaagacacaaatttccaatagcaggaatgaaacaggggctatcaccacagtccctgcaggctacaaacaactctatacacttcagtgaaatagaccaactccttggaaaacacaaagtaccacaactcatccaatagggaataatctgaattagttttataactattaagtaaactgacttcatacttttgaaaatcccaaaaaagaaatctccagccccagatggttcactgaagaattctactgaacatttaaagaaaaataaacacctactctacactgtctcttccagaggaaggaacacttcccagttcattttataaacctagcattgccctgactaaagccagacaaagacagtaccaaaataaagaataccacaagccaggcgctgcggcttatgcctgtaatcacaccactccagaaggctgaggggagaggatgacttgagaccagccctggcaacacagtgagaccccatctctaccaaaaaaaaaaaaatttaaattagccaggcatggtcccagctactagaggctgaggtgggaggtgagatcacacctgggtgacagagcaagaccttgcctcaaaaaaaaaaaaaaaaaagaaagaaagaaaactacaaaaaaaaaatctctcatgaatatagacataaaaatacttaacacaatattagggtaatcctatccagaagcataaaaattctccccacttacaccttcatttctcctatcaaagtgtcttgcgttctcacccatgctgtgcacctcatattaagtcagtctgcattttacacttcctgcccatgtcctctcctgcttctctttctctgaccccttttcaccactccccaaatgtagctgttcctgcaggcttgtcctcaacctcttttctgccttcacctcccagagcttgccaatgagcttcgcttagccccctgattggctgactctcaaatttacttttcccatcttcacctccctcctgataatcctttttccagtggtcagcaacacagacatctacacctcagacgttcaatggcagcaagcacatcttctatgactagaacaggatcatgacagtgtcttctcccaggggaaaaaaaattaaaatagttgtatacagagatttatcattcagattgtggccagcattctaccttttactcttttccctaatcagacatttttgctgacaaatgcaaagcagaagtcgccatctgctagctcctcattggagggctgaaccaagcagtagccctggaaagctgtaatgtaatcactccattcgagagtctgagcggtgggctgagaagtcggggctcagagttccaatccagaactgtgcacgtgctggtgttccccttcaccttctcgcccctccacctccacgtaccagggccctcctcctctcacatcccttatcacaatagcaaactgcgattatctgcaggaacattactcacggccttgctttcaagagtttgttgatataacaaccatcctacagactcgacttttctccttgtaaaactaaaacactgatattgaaacttcccattgcggatctgggatatgtctctatttaggtcttcttttgcatcttttaataaaactgtaaatttttttatatgcagaaaattatcagactactccaaaagaaagaaaaaaagttaaactacactaaaacactcacccggagagacaggagagacaggaggcgcgacagggaagaagggagtcactgctccatctggctgttatgccttccacgtggaaggtatgaagggagaacagagtgagaaacagagagagaggctagacgctttccagatgttcccaatgaaaccttcaacggcctctaatatcttaaataattatgataatagctaacaggtattgaatgcttactgtatgccgggttaaacctattaccatatattcctcaacacactcacttaatcctcacagcaatcccgtgaagtgggtttactgttattcctgttctgtacacgaggaaaccaaagcacagaggctaatgagccatgggtcacccatgttatgtggtaaaacttgaattcaaaccaaagcaagctggctgtaaagctcatacctttaatgccttaattatgttacactgtctatattaattcaagtaagagtgcgagcaggcacacacacacatgcctatcatgtgtatcatttttacattctccatatcactgctactccgctgtaaccatgaataataattacaattgacacacataatattcctctaaaacccaaaaccaacactatattcaaagtatttacctgctaaagagaatagcagactcagaacaaaagatgtttgccactgtgcctatggcccacctgtatatctgtgcttgtagtactattttctctttttcatttaggtcaaaataggcccatcaagtggcagaactccatgacaacccaggtgcgggttctacagagctgtctgcatgctgctgtcattgctgccatcaccaggagcccttccaattaggtaaagagagttctccacaggaaaccatttcagtgaggtcactgaaagcagtatttcagaggattgttttgtttttaagtactaacaacccaaaaaaacatcatttcctgatttcctaactacaggcatgacaaacagcctgtcaaggcaagacagtacctagttcgtgaagtcaggaagtatgttaataagcactaaaacacatttcccaacactatcactgatttgtcttctgtttaaaaaaaaaaaaaaaaaaaaaaggcacttcccagggaaactaattgtagataaagagtaagctctaagaactacatgtagacacttcccaagttacaggagaccaaggccctatgtttttcacaatccaacgaccacagtggtttcttactgtgtaacctagcctggatgaaaaaagggaaacagaacatcctcagcaattaaaaagcaaaacgaagtgtgaaaaactggttgtgccttgacctactgactgaagagtgaagattatgatgcaaccagagaaccagagtttgagccgcccttattacagggctgtttgaaagggaaaacaatttattctttgggcttaagagtaggtttctaaatcccaaggtgttccacaaatgccactagcagacaaatcacaaaatacaaaaggaactcatcaataagtggtgagcattccttccgctgctgaatatatagatattaacaaggaaaatgaggctattgattactccaagttatctgtttacttggcaacaaacctgggcccagaagtctcaactcccaggataagtcctcaatttgaaaattatgccattgccttatctgcttcccttcccaccagttcgctaatgtcccacaaatccaaatcgtattgttttaccagtcagtttaattatgtgtaaaaatcagattcaccacttaagaattttttcaaataacaaaccgggaccgtgctacattaactaaatcagaattcctaggtgtgggggaaaactcctgcagtttgacaaagttcccaggtgattttaatgcagagcacacaaccctaactccaaaactattggtctaatgaagaattgatagtaatggagattcagattgatggcagctcaatcaacatagacagctaaggaagacaaacagcactatcccttagctaacgcagaaagtccgcacttcaatgcaccacatacccttggaagatggggaggagagggctttttcataattgctactgatttatatttacagtgtgctaggcacagtactctagataacacacttcacacatacatttcatcagccacatgggagtactgtcatttccacttcaccgatgaagcagtggtgtatcaccgaggataggaaacttgttcaaggcaatacagcaaccaagttacaaatccaggtccgtatgacctacagccctgtatactgcttcttgcttatctaccatttgtttacttagaggattcattttgtcttaattcattttacaatcattatgtattacttttgtaattaaaaatattaccttgttgcaatctttttaaagaacacctcattacatttttcaataaataatgtgacacatctatttgggaaaaaaaataaagtcagattactgcatgacaaaccaaatccaaaaataagttccaggtggattcaagagttaattataataaatgaaccgtaacaagaaaaggaaaatatacatgtaatttcatctcaagtacagccacttttccaggaatccaagcaaaagtaaaatccagaaatgttcaacaggtttgactatataagaatcaaatgattctatgtattcagaaggaaaaaaaaaaagcttaaatttgattaaaaatggggaagcctgctcaatatgacagaattaaaagaaagcaatcaacagtggtcaacggacataaataagaagttacacaaaaaaagggttcaagtgataaacatgtttatatgtttaaccttcctagcgatcaaagaaatacacatttcaaacaagatactgtgatattttccactaataaatcatcaaagtattgtaaaattataatatctggtgctaagcaggatccagggtaaacattcccacacttggctgctgggattgcaaattggcacacctttctggagcacaatttggcagtaataaaaacactgaaactgtgtctatcctctttccctgtaattctatccgagaaattattcttaaagaatcatgagtgagaaaaaagatttaacttccaaaatgctcatactaaaacattaaaatagtgattaaagtacagtacaactctgaactatgctggctgctacaatgtggcaggtactcttgtgttagtagaaaggtaaactgaaaagtaatttgccatttgtaagaaaaaaaccttcaaaattttcttatctctgattcagcaatttcactttctaggaatatattttaggtgagcaagatttgtatgtaaagatgcaatcacctcattattctttatcatctgtataaaatatataaattaaatgtccaagactaggagcaaggttaaacaaagtgtgactgtcactgatatgactatgataccattaggaagcttttcaatggttttaaataaaatgaaaacatgttcacaatgttagctggaaaaatacagattcaaagccatatatgcagtataacatgtttaaaatgcatatgtatatatttctgaatagaaaaacaaacagaagcaaaaacaccaacagaggcacttctagattgtgaaattataggtgatttctgcattcttcctatctttctcactctccctcctaaaatgagatgcgtcattttcataagggctgggtagcgatgtagaaacaaggttttcaaataaggtcttcagatggattttgctaacttattctcagaacagtcaacttagtatgcaagtgcctagaatataaactaatctaacggttttcgcttctcaaacatacatgatttttattttatgctgtggaggcatacaattgatatcgttagtgccctgggcctccctgaatgagatagagaaagtgaagcaagtttgctaagccatacataaatcaggtttttcctttttttttttttttaagagacagggtcttactataatgttgctcaagctggtcttgaactcctggactcaaggtgatcctctcacctccgcctcccaaagtgctgggattacaggtgtgagccaccgtgcccagccttaaatcagcttatgactcgggcattctccttcaccctttgtgggtgaattcagcttgagacgctttaccatcccatcatcattaccatatttctgattcatcaggtcccctaacttcccaattcctcgttcttgactcataagctccttgtcctttgttaactcgtaaattaaggggttagaccggatgacctcaaagatccttttagactctaggccctcactgacaattgccttgctcccaggaagcacaaaaacatgttttgctgtggggaaaatttcaccaccctacctactcaaggcagcaaggccattcccaagacctccttctcgtttcacctccaagatttcaggcataaggctttaaggccccccttaattttccacagactccattaataatttgggatcccatcaactattttctccattcgaagccactgtgcttttatattttacagctctacttcagaaacaaaggaagccggatgcggcggctcacgcctatatcccagcactttgggaggctgaggtgggtggaagttcaagaccagcctggccaacttggtgaaacccagtctctactgaaaatacaaaattagccgggtgtggtggcacacacctgtaatgccagctacttgggaggttgaggcaggagaattacttgaacctgggaggcggaagtttgcagtcacctgagatcatgccattgcactctagcctgggcgaaaagagcgagacgccgtctcaatagaaaaattgaaaaaaaaaagaaaaagaaaagaagccatgctggaaagagtaggtcaaaattgctgaaaaaacatttaaaagcaagttggaaaagagactttaaagggaaaatggtcaaaaaagcaaacatccaggacgttaaccattaatattattgaccagtccaaaaggtattggacacagccaaatgaaggaatataccaaaggaaaggcatgtgtgtgaggggtggcactctaaggcaggcacccgcaagcggcagctgcctgcttttgtagataaagtttcactggaatacagctttgctcattcagttatggattccgtttgtatggctgcgtatagtaggcattcttatatattatgtatatgatgctttcactctccaacagattctacagttcatcttcctatggctccacttctagacttttgatgggtcatttgggtgcatgtgagtagtatcctacactgcactttatggcctaactgtgggagagggaagtatgttagtaatgagtctccccaatcctcttctattttcaagatcacaggttttttaaatcctgcttctcttctccctagtaacatcacccaagaggtctgaatgactgaaaatttaaaaggactgtgcaactggttcaggcaagaaaagaaaagatgaagcttacaggtgagcccacctctgtccctcttgagctcacaaactctctctgcctgggctatgctatttccatgaaacctccaaacgtgaaaaatcctttcttccctctcagtcagctgccctatcattgaaagtcttcgaaatgatagttgccgaaatgaaggggtaacaaaaataaaatagaaatatgttaatagaagttttctgagctaaacttaataaccagcgaatggagtaggcagttttaggacgttatgaaacgtcctggtttcatattcctcgcctcactctagagtaacatacaaaggcgctcgaacctttaccaagagtaggtctgatgggacttcatttttctcctaacacctgagtctacatcagggaatccctcccaccctcctccagaagaccaccagtctcaactgagacaaggactccgcatcactcctgcagcccctcatcacccataaccctccaatccacagctggcctagggcctgcggaaaagaacaggtctctctctagtcttctgctggcttcaaaccaccctctggacttgccctctctcctagaaatacatttcccatgctcggcctggcccctgacttacttctctccaaactgttcccttaaaatctttttactccgaggtcaaaactcttgaggcctaatcactgaaagatcccaactacacaccaagtattaacagggttttcccccactagaaaagcgagaagtggagggatacagacatacgcctgtcaatcattttttaggtaggtatgcccctcacatctctggacattaagcacgtttccggaagtctgaagagccacaattctgactcttccagaaagcacttaggctcgattctctcttgctcgtgagttcttatgattcctccggctccccacaagcaaacgaatgggaaattcccacaggataaggtatttttaacacatcaaataacagtttaagaaaacggtttttctttcatcacaaaatatttcaaagtccctctgctaaatagcaagtcgctgagaaggcttcgcttcgctccagactctgtgccccgcagttactatcccagcacacaggtcacagcgatagtcactgtatcagaatgcaggactcactgccgaacaaaatacagaaaactgcagagtctgcatggctgcaacacacaaagcctttaaaaacaaaagaaagcacggggagctctgccagtaaaaatgaagctacctaaattggacaaagaataggacaaagtgacaagaaatgctaaagacgactcttaagtaaatcacatatgggggaaataatggacatgttgtggtgttctgcgcttcctcctccaccaaaggagtcgaaccaagaggacttgatgaagcttttagagtttttaaaaagggaagaaaaatccaggttgcggggaagggcgggggtggggtggtgcgggtggcgggggaggggcaaaatccacaaaatttaagtcttctgagagccaaacagattttattaataaaaggagccgaagctctcgctcaatgtggggaagagaaagcagcacccatcagcagccgggcagccctggctcgcctccgaggggctcggaataggtgctgtccccgtcgctgggctcggagctccgccgcgcacacacgccccgcgcacccctgtccggtccagcccgtgcagcgcgaggccggctctaggggagctgggcctgggagccagggtcctgcagcacctggaccctcggacaggaagcggctcctctgactgtggctcctgaaaggaggcgagcccggcaaaaagagccagcggggagggcagcaggcgactgcgtgtagaagcggggggcagatgtgggaaggtgtgctcgggaaggggtgggggtagtccggagctgcgcctccgccgacagaagatgctccgggccagcagccagagaaacgccgcgggtcacagagggtggagggcttcagggagcagaggaagcccaacagctgcagccgagcgtccaaaaaaaggtggaggcgggtcccgagcagcccaaactgggacgagagagggcgtgtgggggcggggagggggtgccccagcccagggacccgttagccctcccggctgccggccgagggcctggcggcctctccccgggcccccgagccaccgggcaggcctactccgctcggaggctgcatgcctcccgccgccgggcagcagcagcctccccggggcacggcggacccggtccctcccgccgcgtccccagcgctcggggccagccccggcaccctcccatgagcccttccgggcgcggcccccgctcctcgggctcacgcgcggccagcagtcctaccggcttccagctcagggacccgccgccgccgccgccgccgcctgcgcgaaagtcggcgtcccagaagccgttctggctgccggccgcccgccttccaggccgcgcctgatccgccgctccccctgccggccggcagccatttccgacaggcgactgcggaacttgccgaagggcgccgcgccggaaatggccgaagccggcgttcgcgagcgggggcgcggacgcgggcgcgcgctcgccactttcccgaccgcgtccgaagaccgccgaggcctcccgcagctccgcggtgacacccgggtcaggggcgcggggccgggcgccggggattgtgggaggcgcgggggggcgcgccggccgccttcggagccccccaactcgcgtcctgcaaaggccgccgggccctgtcgagaagacccgaccgcagatggcggggaggatgctcccggcggcgtgggaaccgggtctgactcccgagccaccgccgcttccgcaggggcgccggccccgggaaagtcaagtcataaatccctgaatctaaaactccattctcagagaaaaggcctccaaggacgggcgccgtgcgcggcaactgcctgcagttttgaagccctttgactatttcataacaaagacaaggccgggcggcttggacgcttaggaaaatcctggggctttgcaaaaacaacaggttaatctagtcgtgtgggatgatcaccaaaacaagacaggaaagaagaacaccgtgtcaatgctgaaaagccagcccctgtgagccccaaagtgcacgttttccacagtcccaaggaacacgtgactgtgtgtttccacacttgagaagtcaggataagaccccttggataatggaacaggggatgggggtgggagcaagcaccctacctggtcacctgcttaacttagaaaccagcttttaaaacctgtaactgcagtatgagctacgatcaaatttgtcttaacgtattttttttaatgtttttaatacccagaacacagggcttctactccagggtttcctcgccagggaaccccaaacacacaggacctggagaagccgggtagagctggctcctggccctgcgcttgggtggtcggctgccttaagaagaactgcaccccagagacaggctcgcagctgccgaccttatccactcgccctttctgctggagcccaggcccagtgctccagcaaggaggctgagaaaatgctgaagactgatgcccacgggggacagcttgggctaaggataacgtttgcaaaacaaacctttaaaaacccatagcaacctgtttcctagagcacactcttcatctctccacccccaaactagtcccgactcggatcctccttttcctatcctctttctcttgctctcccgtctcctattcacttttcctctcctttcctcttgattattataaacaaatgctttccaagtcttaccgccatcatatgtgtacatatgcaacccttactgttaccaatttgttgaagtcaagacaggaggaggcaaagtttaaaaatcagaagcattgcaggaaatgaaaatggagtgagtgttgcctgggtatcataatttttttttttttttaacagttcctctacttggctctcctccaaaggtacgcggccacagcaggcaggggcttggcagtgtgggaggagacaccacagaagacagggaagaactaccaggccttggttcatctccacactggcgagagaggacgtgcagttacctgctacctgttcgactcagtcttttacgttggagtaacaacacattgctgcccttaactttgacttacttgcttttaaagatgatgaagctggccaggcgccgtgactcatacctataatcccagcattttgggaggcccaggcaggtggatcacgaggtcagcagttcaagaccagcctggccaacatggtgaaaccctgtctctaccaaaaatacaaaaattagctgggcgtggtggcgcgtgcctataatcccagctactcaggaggctgaggcaggagaatcacttgaacccgggaggcagaggttgcagggagccgagatcgcaccactgcactccagcctgggcaatagagcaagtctccatctagggaacaacaacaacaaaaagattatgaagccttaggaagaacagggatattcacctgctgctgagcccccctccgctttgatcttgtgagtctgcactctcctgctcccctgtctgtctcctctagctcctgttccttctcctaccttgtgttctctgccaatgatatgactggggctactttcttttttccttctcacactctcttcttgctaatttcaaccaatttccctgcatcatctccacctgcaagctggtcctttacagcagagcttggggccctgctgcccagtagcactctggacaccctcacatcatcatcatcatcctatttttatttattttttggaaacagggtcttgctctgtcgcccacactggagtgtagtagtgcagtagtgcgatcacggctcactgcagccccgatgtccctgggctcagatgttcctcccgcctcagcctctggaataactgggaccatagatcccttccactgtgcctaatttttgttttttgtttttgtttttgttttgagacggagtctcactcttcttgcccaggctggagtgcagtggcatgatctcgactctctgcaaactctgcctcccgggttcaagtgatctcctgccccaccctcccgagtaactgggattacaggcacgcactactgtgcccagctaatttttgtatttttagtagagacagggtttcaccatgttggccaggctggtctcaaactcctgacctcaagtgatccgcccacctcggcctcccaaagtgctgggattacaggcatgagccaccacgcccggcctaatttttgttttgttttgtttttttgtagagacggggttgcaaccatgttgaccaggctggtctcaaattcctgagcttaagcaatcagcctgtcttggcctcccaaagtgctaggatacaggcgtgagccaccacgcggggccttcatcaccctattaatatatactttctgatacttaattgccaggcaataagctaaacccttttattcactgtctcactttaatccttacagggaagtatcggctgccagatagggagctgagacttcaagaagctaaataaggtgtccaacaccacagagcatggagcaaaggacacgggactgcaaatcttcctaactcgtgtgctcatctggctatctcaccagggccttaaatttaatatatcccaaactgaactcatctttaccccttcccactttgcactcctcaaatgtccttgtttaaaatagttacctttatctttcctaacccagaaactcaaaacctggcatcatctttgacttctctctttaccttcacattcaacagtttccaagacttaaaggctttatttgtaggatctctaccactgatcctctacagtttcacacctacatcccattctcgttcccaaatccccataactcctctcctggcccatcccttaacactgaaatcctggcttggaaaatatggtcacattcacagcagctgtccccaagaaggaagccaaggcaacagtatgcacaatgaagtgagtcttcactgatctctccatattttgacattttacagcacttattatctctactttgtattttgaaactgaatccaaaatagttttgcatttgttgtttaacagtcatgtatgtagttttttttttttttttctttttttttggagacagagtctggctctgtcacccaggctggagtgcagtggcgtgattttggctcactgcaacctccgccttctgggttcaagcagttctcgtgcctccctgagcagctgggaatacaagcatacaccaccatgcccagctaatttatttttagtagagatgggatttcaccatgttgcccaggctgatcttgaactcctgaggtcaggcaatctgcccacctcagcctcccaaagtgctgggattacaggcatcagccaccacacccagcccctccatgtgtgtagatatttatccacatccaaaaattaggaaaagcaggacgcattgaacctttggtacccagcagcaggagcctgtgggtcttctgtctggagcacaatcacaaggaccgagcatcagcagcatccactgtcctttcagctccaaattttaaactcccgtaagagagacattattggcccagcttgggtcgtgtgtccacccctttaatcaatcagctttggccaagcagcaggtcatcctggtccaaacatcacagttgggggcctcacttgtaaatagagcttgttcccaaaaaagagggaggcacacaccattcatttgtttattcattcattcaatcagcaaatagttgagcatctatagaaatatatttaaggttctattatgtacacaaaatgtataaaacatggccctgccctcacaccatgaaagttaccacataaaaagaagtcaccagataaaaaaagcataacagtattcataagtactcatgagtgaccatcaattcagttacacatgatggaagataattcattatacctagtataagccagtgacggtaaaaatagttagcagcaatgtgtacatgatcaacaaaagctcacagcagcaccatttacacaaaaacagaaaagtacccagatgtccatcagaggtagaccagataaaatataaaatataccaccacacaatggctaacacctgtaatcccagcactttgggaggctgaggccggcagatcacttgaggtcaggagtttgagaccagcctgatcaacatggtgaaaccctgtctctactaaaaatacaaaaattagccagttgtcatggcatgtgcctgtaatcccagctactcaggaggccgaggcaagagaatcgcttgaacctgggaggccaaggttgcagtgagccgagatcacaccactgcactccagcctgggtaaaaaagcgagattccatctcgaaaaaaaaaaagtgtatatgtatagtgtatgcatgcacagaatactttacagcaataagaatgagtgttctgcaaatatacacaatattgctgactctcccaatgttaaacaaaagcatccagacacacaacaatgtgtacagtatattattccattgatagaaagcttaaaaacaggcaaaattaattcacccttatggagtcttaagtaaggggaacaaaaggggccatctgggcagtgataatgctgtttcttgagctgggtgctgggttcacaggtgtgttcagtttgtcacattcatcaagcttacacttctcatacatcttcttttctatatgtatgtcatccttcaataaaaagtttttaaaaaataaataattgggcttgtgtggtgggctcacacctgtaatcctagcactttgggaggctgatgtgggagaagcacttgagtccaggagtttgaccagcctgggcaacacaggaagaccctgtctccacaaaaaatttttaaaagcctggcatggtggcacacttaggtgggtaaggtgggaggatcgcttgagccaggaggttgaggctgcagtgagccgtgatcgcaccactgcactccagcctgagtgacaaagtgagaccatgtcttaaaaaaataaaaataaataattggcactcaaagtaagacacctttaatctcccttgaacatcagcaccatgattatcctggagttgccaattattcccacactccccacctcctccccatcaccaccaccattatgcccccttcttagacacataagacactggagcctttggaaggagccactatatttaccgcatgacctccttccctctggtcccagcctactggacttcttacctggaattgtgggaacaggtcactgtaactaagtcacgtgacagagtgcttgatctattaatttacacatatttgcaagaaagaatttctgggcatgtgcacagtgataagctcagaaagctggtctgcagaaaacagaagcaaatagagtcagcatagagagggaaacaaacaaacccaccagagatggagaagcctcagaggctgttgacattgacctgtggtacccacatgtcccaggtgacactgggtgtccacgtgattgcttatgtagccttactatttaaaaaatcctcataatcccagcactttaggaggccgaggcgggtgtatcacaaggtcaggagttcaagaccagcctgaccaacatggtgaaaccccatctctactaaaaatacaaaaattagccaggcatggtggtgggtgcctgtaatcccagctactcgggaggctgaggcagagaatcacttgaacccaggaggcagaggttgcagtgagccaagatgccgccactgcactgtagcctgagtgacaagagcaaaactccgcctcaaaaaaaaaaaaaaaaatcctcatttacttaaactaacatgaatacgtttctgtctccggccaccaaacatgaccctgcatgttcttccctggaagaaactaagtagttattttgtttgtttgtttatttggagacagagtcttactctgccacccaggctgaagtgcagtggcgtgatctcagctcagttttggcaacctctgcctcctgggttcaagaaattctcctgcttcagcctcccgagtagctggattacaggcatgtgccaccacgcccagctagttttctgtatttttagtagaaatggggtttcgccaggttgcccagtctggtctcgaactcctgagctcaggcaacctgcctgctttggcctcccaaagtgctgggattacaggtgtgagccactgtgcccagccccttagttatttcagagccagactcttaagcactttgcatgtgtcatcccatgtgctcctttaacgaccctaaacaataaggaccattattagtcctttgtcacaaatgagaaaaatgaagcccagggaggttaactaatttgcctaaatcaccagcctagtaagtggtggtgccaggttttggaccctgacagtctaactccagagcctgaaactttaccagctgtgctccgctgtggtgcaagagaaatgctgaccatggcgatgtgaattgtctgctgcattagtagatttaacaaaggcatttgatttgttaaatgagttcaaatgtagaaatgatacaaaagatcggctgtctagagaagctggtgcacacatttctttcacaagggaattatcgtttgaggtatacaagccagagaaatgtaaactgcatagagtgtgacagatatgccaaacaagtctgtgttctcttaccaataaattagtttacagatttcagcaaatgctctcttgggggcccccactgattgcttatttttccccacgtgtttaatatccaggagaaggggatttgagtcccacagaaggagaaactggtgataacagttacttcaagtctcagagagggaggtgcctcattttccatgttaatggctgccagccccacaatccactcagcaagccttctagatcaatcccaaacaagccattggtgacccccagcaatcttcaaagggaattatcagtgaggttaagtcagataagaacttagtctatttgtaaggctttgattttaaaagaaagtgctgacagccactattcaagatcttttctatatataaatgactgagcaattttgtggcttataattagaacaatgcatgacaatttctagattgaggttccaaggttactcttctctttggtctatcagtgccaaaaagccaaaaggtcatcttctaaggctccagggatagcactcattaccctgataaatggctcactctagaagtcctggctttgatgttaccttttaaaagtggctggtttttgtctggccaaaggtggggccatttgggtggctcacagataatttgtggcaacactgagttaatatcagtttcaagacaaaacacattttattgttaagaaactatttgttaactcattacctcatgtcatagtattctctgccttgccatgtggctataaaaaaaaaaataaacattcaagtttcacattagaaagcttagcctgattcaaatctgttttctgtggctgggcactgtggctcatgcctataatcccagcacttttgggaggcagaggtggggggatcacctgaagtcaggagtttgagaccacactggccaacatggcaaaaacccacctctactgaaaatacaaaaattatcctggtgtggtggcgggcgcctgtaatcccagctacttaggagcctgaggcaggagaattgcttgaacctgggaggcggagggtgctgtgagccgagattatgccattgcactccagcctgggtgacagagcaagactccatctcaaaaaaaaaaaaaaaaaaatctgttatctgcataagacacctaacctgtaatgaccaattaagactcaaattagctagcgccaacagcgggtatcaaaatgccatcaaaattttctaagcttgcacctacaaatgttccctaaggcaagcataaaggcatctaacatttaccctaaattatgccagtgagtagcaaaaatgtgctcagttagacgcaacatgtcacaacatggtctgactgttggaagaacttagtgcagggagagctatacccagaggaaagaagtaaaattaggcagagtgttgatggctgagttccagtgtcacatttatatacagctcaatgactctagaattgtccttacaccaaaaaaaagttattcatagattcaaaaaatcaactgctcactactttcatttaaaaatgccttgtgtgaacaaggcgttccaactgaaaactggcagaattcatagaggttcttaaagaacatcaattagattcttagtcaaccaatttggctgtaaaatcaaaactgaaagtgcaatttccaaaactaattatgctaaatacttttaaatatatataacttgataataacatttggactttatgtatggaaagaaacagtagtttccaccacaggaattttcaaaagaaaaatatataggttttaaaccaatttatgaagatctgcaataagattttattgaagagaaagttttcccctattttcctaaatattactcaaaattaattctcaacccaaaaggtgacagcatgattctagtagggtccaagtcaatcccagaacacaataataattgatcccttccccaacccaagccttcagccttgcaaacactatgccatagatcaaaagtggaaccaaatgaaaatgtgaccatatttctacaaatccatcaatttggagggcaaaaaaccaacaatccaaagcccatctctaatggacagtgttagatatttcaccctcatgtcaaaagaaacatgtataattacatcatctaggttactaagaaaagcatatctttaaagtgaaggggtatttagaaaaaggatacttgacataaatgatgcaaatactcaaaaaatatattaaatatctgtgaaatgtgttaactatgaaagctttttaaaagcacatgctgagccttgtcttactttcgtgtacatttaaccaggcttcaataatgctctatttatctttatttcattaattaaataataaatatctaaatttttttattttttgagacagagtttcgctgttgccccccaggctggagtgcaacagtgtgatctcggcacaccacaacttctgcctcccgggttcaagtgattctcctgcctcagcctcccgagtagctgggattacaggctcgcgccaccacgcctggctaattttgtatttttagtagagatggggcttctccatgttggtcaggctggtctcgaactcccgacctcaggtgatccacccacctcagcctcccaaagtgctgggattacaggcgtgagccaccgtgcccggccaacatctacatattagtaggaacacaatagcaaaaaaaaaaaaaaaaaaaaaaatcacaaaaactgataaatatttaccaactctgtggcttccttccagctcatgagcataattttataaaattgctatctctatgtgtcaaccatttcaagtccttctttttcacttactttgaatgaagtattatgtttctacatgatcttcacagtcatcttgaaagttactggagcatcctatggtctagctcagtgattcctgaataacagtttattgaccaagctaggatgaagttttcatcagtccacagttaaatgcgaaaagcacagacaagtttgtgagtttttaacaaagctgaatgattcaattgaaaggattagactttattctgagattatgttattctcccttttttatgttaaaatgtgtttttatgaaatgaccatggtggtggtcaacggcagctttttctgtatctttctcactcaacaaaacactgaaatatactaattttggtatcccctacccagttattttttattttactggtctattaaacctaaaagtctggtaactataataccagtctagcctgtctaacaacacacatatatattaaggcatacacttccccccaacttcacccctgcaatacagaatgtttttggagactcccatggcagccagcctctgaaagggcccccaatgatccctgccccctggtattcacacagttgtgaagtctccacccacaccctaactaggatccatctgtgtggccaatggaacacagcaaaagtgaaggtatgtcactcccaggattaaacgacacaaggcatttcagcttccatcttggttgctttctccttcttagatcactctgggagaaactcactgccatgttgtgacaacactatggagacgcccaggtgagggactgaggcttcctgccaacagccacatgaataagattgggaacagatcctccagccccagtcaagccttcagatgactgcagtctcatgaaagaccctgtgccaaaaccacccagcttgatgaaataatctgtacaacaaacccccatgacacaagtttactacaacaaacctgcacatgtacccctgaacttaaaagttaaaacaaaaccaccaccaccaccaccaccacccagaaaaaacacccagctaagccacttctgaattcctaacctacagaaactatgaaataataaatatttgtattttcaaaattagctgggtgtggtgccatgtgcttataatcccagctacttgagaggctgaggcatgagaatcacttgaacctgagaggcagaggttgcagtgagccaagattgtgccactgcaatccagcctgggcagcagagcgagactctctcaaaaaaaagaaaaaagaaagaaagagagaagaaaaattaaaattaatgtgtagaatattttttaaattaaagttaaataaataaatatttgtactttcaaccatcaagtttgaggtaatttgttattgaccaatagataataaatacaacccttttatcctatttcagccacaaaatgagcatccctgtagccccccagggatgcaatgtggtgcaatgcagaaactgtatttatggctgagttggaagagagatcggatcagcaaagactgtgatctcctttaccctggctttagtttacatactctgacttttttcttctctgttgctttttctacttttcttgtattgaccagggtactcagtaaactgaataatccatctctagcaagggactcaatcctgcaagtttatatgcttaaaggaattactttatgtaaatatggtattttatgaaattttagaaaactggtaaatgtctattgacagaatccctaaccccagctgtccaaatctttgctagactcatccataccttaaaagaggagcatgtcttatatttcactaagaaaatagaagacaacagatatgaactctttgaaatgccttccttccacctttaaaactataagtattgaggtgaaaactattattttagtagatgctagagttcttagggatggaaaatgccttatttaggaaactactttgaaatgacatttgaagtatggaaaaagagagaatgacttagaataaaactctgaagcaaagagacagctagtcagatctatattttttaaaatccaaaaacatggggactggaggagaggaaatggaggtggataagaagagatggggctcaaataacagtgtgggaggctggagctgcgggagagagttcccagtgataggggagccggagaatgtttaaaatagagatatctattgtcggaattttaagttatttgtgttgctaaggatataaaatcccctaagccttcagtaatatctgtcacatgcacaaatgccttatgtgagtgatttgggggagaattacgaaaaaagattgcaaggggctgagctccacaactgggtcagcaaagaaccaagaaatgagaacagccacagaagttcagatacaagtaagataaagaatttaatggaagcagaaactcaaagccaaagaaaccataagaaggagagcttccaggaattcacagaaatcttggattgagtttcccaatggatgcagaatggggacttaagccaatgttacttaaatctcagaaaagaatgttgccttaagctgacagctgagtacatattcactgattcttctttcatctcttccggcccttgacaaagagatgtccttaactcctttctgaaactaggtgctccatttttgaatgtgatctaatatccttcctttaactcttgcttgatcagttattctctttgctacatacatggtcaataacctccttactatagcgttttacccccattctgcttataaacaggttcagtctcaggcctggggaaaataagagaataactcagctcaagctaccatcatcttacaacacgggctctgaacccagaaagatttagatttgaatccttgttccactatgtattcatggtggaacaccctgggcatattacataacctctctatactctctccactacaatttcctcatcagaacatggggataataacggtacctacccataggagtagtgtaaggattatcccagataatgcatgtaaattgttagtccagggcctggtatacagtaagccttcactaacatcaactgctgtcatcatcatcatttgcccaaattcttgagtcatctcaggctgggcacagtggctcatgcctgtaatcccaggactttaggaggccaaggtggacggatcacctgaggtcaggagttcgagaccagcctggccaacatggtgaaaccccgtctctactaaaaatacaaaaaaaattagccaggtgtggtggcaggcacctgtaatcccagctacttgggaggctgagacaggagaattgcttgaacctgggaggcagaggttgcagtgagccaagatcgtgccactgcactccagcctgggtgacaaaagcgaaactccgtctcaaaaaaaaaaaaaaaaaagtcatctcttctctactgtcattcactctttaatccctggggggctggctgctgtcaatttactgaaactgctctcattaagataaccagtgatcacttctaatatgaggttatagaaaaaacaaatgaaaacacaaaatgaaaaaaagaaccagcaacttcctaaattcgttatcccacttaatctttcaggcctttggaactcttctttagaatttaacagacctagtcactcaccttcttgaaatggtccagtctttgctttgcatggcattgcctctccccatcctttctcttttctttcattaagtcttaattctccaccatcccttaaatgcttgtgtgtctgggtctccacccttagccatctttttatcactaggtgaacacttctaagacttcagcagccaaatctctatctttagcccagaccttccttctgagctcttgagccaaactgtccactaaatttattgtctaaggttttcacagtcatccaaaccaaatttatagagactattaactaaatcattattttctctcccttccccaattctttcccttccctagtaatcattttctttttttcctttttgagatggagtctcgctctgttgcccaggctggagtgcagtggtgtgatctcggctcactgcaacctccacctcctgggttcaagcgattctcctgcctcagcctcccaagtagctgggattacaggcgcatgccgctgcacctggctaatttttgtattttaagtagaggcgaggtttcactgtcttggccaggctggttacgaactcctgacctcaagtgatccatccaccttggcctcccaaagtgctgggattacaggcgtgagccaccgcaaccagcccctactaatcattttctcaagtttccagcttggactggaatgtcattgttatagtctagccaggagtccaagctggaaacatcagttgttatccttatatctccctcacccagcatgtccaactggctatcagggcctgacagtcccacctcaaagtctcatggcttccccgagtcctgctccatcctacatgaccccactgtatttcagagtgggctttagagtcacatgggcctgggttcaaatattaactatgccataaacctactaatgactgtttttggtcaagtgacttaacctctctgacctcagctttttgtgataattaaatgagatatcatatgtaaaatagctggcacacagtaagcactcaacaaacattccgctgcatccccttcctttgggtctccattgctaccgggtggaatgcaatatctacctacttggtctatcttgtcctttctcctcctaattgccctagagttaatttttctaaaataaataaataaataaatctggtactatcatcgctggctttaaaaccttcaacattttcttttttcctgtggaatgaagtctcaattccttaacataagtggtaagttccagctgcctttctggtccctgctccccaagcccatttactccaaaacattggctttttgccagccacttcatgtacatacgggcttaatctccacacatgaagagccctttgactaattcccttccccacaccaagttctgtccaattggcaagaacctcaaggcccacttcaaaaactatcatataaagggtgatacctattcttaagtggttcaatttttttcttttcttttttttttttttgagagagagagaggatactgttatgttgctcaggctggtcttgaactcctgggctcaagtgatccacccccatgtcagcctcccaaaatgctgggattacaagtgtgagcctctgcacctggcctggttcaattttttaaaactattttttacatatacgcaaacataggccaggcaccgtggctcacgcctgtaatcccagcactttggaaggccaaggcaagcgaatcacttgatgtcaggagttagagaccaacctgaaaaacatggtgaaaccccatctctactagaaatacaaacattaactgggcatggtggcagtcacctgtaatcccagctactcaggaggctgaggcaggagaattgcttgaacccgggaggcggaggttgtaggtgaggcgagatggtgccactgcactccagcttgagtgacaagacaagactctgtctcaagaaaaaaaataaaaataaaaaataaataaaaatataaaatatgtatatatatacacacacacatacataatatacatatatacacacacacaaaggaagagagagagaaaaagtgctaaaatgtggatgtggcaaaacatcaaaaactggtgaatctgggtaaaaatttcaaatgtacaaaaaacttgcaaaatgccatataattctggcaacatttctgtaaatttgaaaatatttcaaaagaaaaaagaaaggacgggcagggtggtttgtgcctgtaatcccagccctttaggaagcggaggcaggaggatcacttgagcccaggagctcaagattacagtgagttatgatcctgccacttcactccagcctgtacaacagggccaaacaactagcctatgttttaaaaatgtcaatgtcgtcaaaaaaagcaagggcagaaggaaggaaaggaggaagagggagaaggggagggggagaggaaggaaaagggagacaggaagaaagaaggggaagctgaagaaacgttcaagattagagaagacaaacatgagagctaaatgcgatgtgtgatcctggattggatgttaaattggcattaaaaaaaactgctataaaatacattacttggctgggcatggtggctcacgcctgtaatcccagcactttgggaggccgaggtgggtggatcacgatgtcaggagttcaagaccagcctggccaacatggtgaaactccatctctacttaaaatataaaaattagctaggcgtggtggcacgtgcctgtaatcccagctactcaggaggctgaggcaggagaatcgcttgaacccaggagacagaagttgcagtgagctgtgactgtggcactgcactccagcctgggggacagagcaagactccatctcagaaaaaaaaaaacaacattattggaacaagtggtgaaatttgcaaattgactctttattatataatagcattataacaatgctaaatgtttttaaaagttattctgtagttatgtaagagaatggccttgtgctttaaaaaattcatgctaaaatatttaagggcaaaggatcatgatatgtgcaactttaaaatgtttcagataaatagtctgtgttcgtatgtgtgtctagagagagaaaaaatatagcaaaatgttaacaattgataaatctgtattaagatttaccacttttacaacttttctgcacgtttgaaatgttttcaaaattaacttttttaaaaaatattttttctgaggcagggtctcactctgttgcccaggctgcagtgcagtgccaaaatcacagctcactgcagcctcaaattcctcggttcaagtgaccctcttaccccagcctcccgagtagctgggactacagccatgtaccaccatacccagcaacattttttattttctatagaaacaggtcttgctgtgttgcccaagctggtctccaactcctatcctcaagcaatcctcccacctcagcctcccaaagtactgggattacaagggtgagccatcatgcatcgtgcccactgaaaataaaaaaatatttttacagaaccacctcagatagaaataatgccttctgaaaaccaaaaagcactgatgatagatagtacaaccactgtgaagagttttgaggttcctcaaaaaactaaaaatagaactaccatatgatccaccaatcccactgctgggtatatactcaaaagaaagaaaatcagtatatcaaaaaggtagctgcactcccatgtttaactgaggcactattcacaatagccaagatttggaagcaacctaagtgttcaccagtagacaaacagataaggaaaatgtggtgcatatacacaagggaggactattccgccatataaaaatgagaccctgtcacctgcagcaacatggatagaaacagaggtgattatgttaaatgaaattagccaggcacaaaaagacaaacttcacggtctcacgtatttgtgggagctaagaattaaaacaactgaattcatggagtagagagtagaacaacaatggttacctgaggctagaaagggcagcggtgggggaaaggggggatggttaatgggcacaaaaatatagttagaaacaatgaataagatctagtatttgatagcacaacagggtgactatagacagcaataatttttttttttttgagacggagtctcacactgtggcccaggctggagtgcagtggggcaatctcagctcactgcaagctccgcctcctgggttctcgccattctcctgcctcagcctcctgagtagctgggactacaggcgcgtgccactacgcctaattttttgtatttttagtagagacagggtttcaccatgttagccaggatggtctcgatctcctgaccttgtgatccacctgcctcggcctcccaaagtgctgggattacaggtgtgagctacctcacccggccaacagcaataatttattgtacattttaaaataactaaaagagtataattggattgtttgaaacataaaggataaatgtttgaggtgacagatatccccccaaaaaatcaatgaaagaaattacagacacaaataaatggaaaaatatcctttgttcattgaatggaaaaattaatgttgttaaaatgatcatattactaaagtgatctacagattccatgcaatccctatccaaattccaatgacatttttcataaaaatagaaaaaataatcctaaagtccatatgaaaacacaaaagaccctgaatagccaaaacaatcttgaatgaaaagaacacatcacgacctgatttcaaaatatactgcaaagctacagcaatcaaaatagcatggtactgctatgaaaacagacacatagaccaatggaacagaatagagagcccagaaataaatccacacatttatagtcaattgctcttccacaaaagtactgagaacatacaacgggaaaaagagagtcttttcaataaatggcactgggaaaactggatatccacattcaaaagaatgaaattagacctttatctcacacaatatacaaaaatgaattcaaagtagattaaagacttaaacacaaaacctgaagctgtaaaactactagaagaaaacacaggagaaaagcttcttgacattggtttgggcaatgattttttggatatgaccctaaaacacaggcaacaaaagcaaaaatagacaaatgggattgcatcagactaaaaagctgccgcagcctgggtgcagtgactcgtgcctgtaatcccagcactttgggaggccaaggtgggggcatcacttgaggtcaggagtttaggaccagcctggccaacatggtgaaacctcatctctactagaaatacaaaaaattagccaggcatggtggcacacgcctgtagtcccagctacttgggaggctgaggcaggagaatcgcttgatcctgggaagcagtggttgcagtgagccgagatcgcacaattgcactccagcctgggcaacagagcaagactccatctcaaaaaaataaaataaaaataaaaagctgctgcacagcaaaggaaacaatcaacagtgaagagacaacctacagaatgggagaaaatatttgcaaaccatacatctgataaggggttaatagccgaaatatataagaactcaactcaacagcaaggaaactaataacccaatttaaaaatgagcaaaggacctgaacagatatttctcaaaaaatatgcaaaaatggccaacaagtatatacatatacaaaaaaatgctcaacttcgctaatcattaggaaaatgcaaattaaaaccacaatgaaatatcatctcacacctgttagaatagccattatcaaaaagaaaacaaatgttgatgtagacgtaaaaaaaagcaaaccttatatattgttgttgtttgagacggagtttcgctcttgttgcccagactggagtgcaatagtgcaatctcagctcaccgcaacctccacctcccgggttcaagcgattctcctgcctcagcctcccgagtagctggaactgggactacaggcatgtgccaccacgcctggctaattttgtatttttagtagagacagggtttctccatgttggtcaggctggtctcgaattcccaacctctggtaatccgcctgcctcagcctcctaaagtgctgggattacaggcgtgagctaccatgcccagcctatattgttgataagaatgggacatggcacaatcattatggaaaaacagtatggagactcctcaaaaaattaaaaatagaactaccatatgacccagcaatcgcacgtctgtagtatttacccaaaggaaatgaaatcagcatgttaaagatatatctgcactctcttgttcattgcagtgctatttacaatagccaaaatatgaaatcaacccgagtgtctatcaagggatgcatgaattttatttattttttgagacagagtctcgctctgtcatccaggctggagtgcagtgacacaatctcagctcactgcaacctctgcctccagggttcaaatgattctcatgtttcagctacctgaatagctgggattacagacacgtgccaccatgcccagctaatttttttgctatttttagtagagacagggtttcacaatgttggccaggctggtctggaactcctgacctcaggtgatctgcctgcctcagccgcccaaagtgctgggattacaggcgtgagccagtgtgtctgtctgggatgcatgaatttttaaaattggaatactattcagccttataaaaaagaaggaaaattggcaaggcgcagtggctcacgcctgtatcccagcactgtgggaggccgaggtgggcggatcacaaggtcaggagtttgagaccagcctggccaacatggtgaaaccgtctctactaaaaatacaaaaattagccaggcatggtggtgggtgcctgtaatcccagctactcaggaggctgaggcaggagaatcgcttgaacccaggcggcggaggttgcagtgagctgagatcgtgtcaccgcactccagcctgggcgacagagtgagactttgtctcaaaaagaaggaaatcttatcatttgtaacaacaaggatgaacctagagacattatgctaagtgaaataagccaggcacagaaagacaaatactgcattgatctcacttatatgtagaatctaaataagtcaaactcataaaagtagagaatagaatggtggttgtgaggactgggggtatggggagatgttagtcaaagggtaccaagttgcagttaggatcaattagttccggagatctgctgtacagcatggtgactataattaatgtatatttataaattgctaagagattgatcttaaatgttctcaccacacacacacacaaataagtatgtgaggtgatggatgtgttaattcatttgatttaatcattttacaatgtgtacataaaacatcatgtcataccctgtaaatatacacaacttttatttatcagttacacactaataaagctgggataaagaaaagaagaaataaatagtatgctgttttttttttttttttttttgagacagagtctgtgttgcccaggctggagtgcaatggtgtgatcttggctcactgcaacctccacctcccaggttcaagtgattctcctgcctcagcctcggagtagctgggattacaggcacctgccatcatgcccagctaatttttgtatttttgtagagatggggcttcaccatgttggccaggctggtcttgaactcctgacctcaggtgatctgcccgccttggcctcccaaagtgctgggattataggcataagccaccgagcccggctgaggaattccttcttttttaaggcaatagtatttgtcttacaccggaaaaaaaaaaagcacaaatattaaattctagcttgcttttcaaaaaataaaaaagaactaatgctgcttggtttaagctgctgtaaatgtttttacttttactataaaaagcctggattgagttgtaattattggtttaagcatttgtcttattctattagactgacagcttcttgatgcaagaacttaaattgccttttggaattgaatagtgagacaagtatcctaattcagggcagtattattttcctggcatggcattattagagtactaatatgctacaatttaggatcatagtaaacaaggctggacattctttttttttttttttttaagaggtagggtcgggtcttgctttgtcactcaagctggaatgcagtggcatgatcatagctcactgcagccttgaactcctgggctcaagcgatcctcctgcatagatgggactacatgagtgcctcacgacacctagctatgtttagttttttgtagaaacagggtctccctgtgttgcccaggctgctcttgaatgcctgccctcaatgaatcctcccaccttggcctcccaaagtgctggaattataagcatgagccaccagactggacattcttttttttgagacagcatcttgctctgtcaccaggctggagtgtagtggcacgatcttggttcactgtaacctctgcctcccaggttcaagcgattctcccgccttagcctcccgagtagctgggactacaggcacgcgccaccacactcagataatttttgtatttttagtagagacgggatttcaccatgttagccaggatggtctcgatctcttgacctcgtgatctgcccgcctcagcctcccaaagtgctgggataacaggcgtgaaccggcatgcctggcctagactggacattcttaaaacgggaacaagaatagaaaatgaccctgtggtttggagcatagaacagtgctggcattaatctactcaatgtactgttctgtgtctttacagaaccttctgcaggcaagactggaaagtccacccctggtcccaggcagatgcacaaagaagctggtataagggagaggcctcatgaaagttggagctgaatttgccattgatgcctaggattgcaacccctggtatttgttttatcacttccactacacacagtgcaggagggcagcccatccttagttggccagaggttttactttaaaacccatgggctaagacaccaaacagttggaacatataggggaaatcatgctcttcccttctccccatgcttgttttgatcaagaagctaggaaactttctcttctccacagtattgaagcgatggcatctgtcttagtccatttgtgttgctacaaaggctgggtaattaatttataaagaaaaaaaggtttatttggctcgtggttctgcaggctgcacaaaaagcatgccaccagcatctgcatctggtgagggtctcaggctgctttcactcatgggggaagttgaaggggagccagcgtgtgcagagatcacatggagagagaaaaagcaaagagagaggggagaggggtgccaggctctttttaacaccagttctctcagaaactaatagagtgagaactcacccactccttctaccattaatctattcctaaatgatccacccccattacccaagcatctctcattaggcttcacctccaacattgggaatcgaatttcaacatgagatttggaggggacagacatccaaactatctcagcatccatccttctctctgcgtactctgctgacttactcttccttgtagaagaaaacaattcagtgtgtgatcgatgagactaggtgcagggtcactgcacactcaccactcaggctgcctttgaattcctcttttgtagatgtctgcccacaggccacgtgccttcttctctcctccattcagcagcagatacagcagtttccggcgactatgcctatgaccaaggtcaagttcaattcatggagaaagaaatgagaagcctgttttggccttggatccaagccaccttctccaggccagcttcagtagcaatcaagctgacattttaaacccagtctgattcctgtgactgtaccatttggttcaggactcaaaagagagaagaagatgaaggacctctcagaatcccaacagtattttactaatctttggatcccagcacctctcctggtgcttgttctattacaagccctcaataaattttgttgtcttgaactcagagtgtgcagcacacaggcagatagctgctcacagctattattggggtggttgtgtttttttttcgtaacagaacagagtgatttttgatgcttttctagtttgtcagagggctctgaggctatacagaagcagctttagtgaacagaggagagcgagctgtgtctttgtgcttcacaatgattgcaatgccagagagtgatgtcccaggggagctgtcaaacagcttgacagcaattctagcaagaagtggtagaaacacaattttgcaataatgatcatacgttttttgaaattttcctttatccttgaaatgccttgtgttgtcgaaaatctattcattactgttcagtcatctgtagcgagtcatccctttaggtctctgtactcggaagttacagccctgggagtattttggcagagagacaaaggctcctaggcacagtgggggagtcagaaaggtacaagtaaatagcggctccaaggagttagatttttaaaaaaataataaaaggacgggaagtgacaagaaatcatcttcctcaaagcggctttagttttctaaaagcaggcaccatagctctttgatatttttaccatgcacatctctggtgctttcattttctttttcctctaatcccttccatgcatttccttcattaattatcccttttctctccaggatgttcaacttctccctgtctctactgcctccttcacctcgacctataaacatgtacaagtttcttacatcctcagaaacttccagctaccctcaaatgctcactctcttcccttctctttgtagccaagagacgagcctattccagtgctacccaaagcatggtctgcagaccagcagcaccagcatcccagggaagccagatttgaaatgcagttctcacgctcacccagacctactgaatccgaatctctgtgggtggggtccaagaatctgtttcaacacactctccaggtgatgcttaggcacacgggggtctgagaagcactgcctctacttcctgtctctggtcaccactttgggcgatcttcctctgtccctttaaggtgtgcaccttccccagggctctgtcctgggccttggcttcattgcactcaatcatttccctacgtgatctcatccaccaaaggttgatttggttatttgtgtgttttaacataggtttataccagtgattctcaaatttatgtctctatcccagacctctttctctgagccctaagaatgtccagttgctttctggacttgtttaccaaaatgttgcacagttctctaaactatgtctaaaaccaacttagtatctcctaaacccactctgcatcaatgtcaataatctgggttgtgtgacagctttgccacccccttggcgcctgccaccctgggatccagctacacccactgcctttatgcttcccagttcactgactgaagtgcacaccacaaggtctggcctatagacaagagcaatcacagagctcttcaaggatgccagggcacccctcatatatttatttctcacattcttgatgaaatgtatgccttctagaccctcccagggtgggtgagtaggcctcaaatgacaattgcactgtaactgccagtcccttaagtctttgaatcccttcctccacattaaaccaagacatgtccaccatctccagttcactcacgtggaccacctttgagtctatgtttcagccagccaaccaaccaatcagattcaacacttccttttttcttctttttttttttttttttttgagatggagtctcactctgtcacccaggctggagagcagtggcatgatcttggctcactgcaacctccgcctcccaggttcaagcgattctccagcctcagcctcccaagcagctgggattacaggcgtgcaccaccgcacccagctaatttttgtatttttagtagagatggggtttcaccatgttggtcaggctggtctcgaactcctgacctcaagtgatctgaccgccttggcctcccaaagtgctgggattacaggcatgagctgccgcgcccagccagattcaacattttctaacgcccaaagctgcaacgctaaatggagaatccctgcttagtgagcccatgtcaaaacattcagccccatccaactttatgttccttccacctactgggtgaagtgtcagagccccagcatcagaaagtggtcagctcatgggtagtagggtagtaagaagaatttactgacaacagtataggttagaaaaagacagttttattagatagaagagtgtagctgggcactactgcaagagaggaccgagcgtgctgcagtggacttttccttaggggtatttatgaatcttaaagagggagcttaacggtaattggactatactgaccacagaggtcatgatacatgattacatttgtagacattttggtgccttgatgtcagcaagtgttgcacgatgagtttcgacatgcatgcattctggagatgtatagaaattctagttatttatacattttggagaaagcagcccataccagatgcctgctttagatcatagggaatctcttatttctaaatccctcagctgaggagtttggcctctggatggactgtttggtgcctctcccaggtgatctttgctctcctcaccaccattatcccacactcatagtatccattcccatacacattccctgaatttctgtctgtagaaatttaaaaagtcaagtagttcagtggagtgcagcacacctcttatgggccagtcacacagtgtacctcatcttcaggggctgctggactgaagtctaacaaagaggagtggtggggtgggtcctgaggagttcaacattgtgttgctcagcacctgcctcaggggaggccattactatttcctcaggcaatgcaggcttcatcctctcagaggtggaaagaccaataccactgagggttgggaatgccactgttgctggggttgttgggaagcaaaggtgggagtgctccttcactgataaaggagacatcagaatttaggggctcaatgtcctcagctttatcaaagttttcccaaacatccccatcccaacttgcaagatcccattctttcccaattaatgctctcactttaactgcacatagcctgcaaagctgtgagttcaacttgcgttgtaattcagccacttgcaggatgaggttctgcatttgactttcagcaatttccgcccttctgtacagtaaataaaggtctccctcagggcacacataaaagttcctaggtcatttttgtggtgcatgaactaggaatgtgaatccctgacctcatcctttccttccaccagcatgacattagggttccaaccagcatcattatattcattcattttccaaaatgttcgaaagtatcatatataagccaggcatggtggctcacacctgtaatcccagcattttgggaggccaaagtgggaggatcacttgagcccaggagtttgagaacagcctgggccacatggcaagacccttgtctctaaaaaaaaaaagctgggcaaagtggcacatacctgtagtcccagctactcaggaagctgatgtgggaggatcacttgagcctaagcagtcaaggctgcagtgagccatgattgtgctactgcactccagctggggtgacagagtaagactctacctcagaaaacaaacaaacaaacaaacaaaaggtatcatatataacattactgagctcattgattctatagttggttgattaggagtatccaacacagtattctgtgtatctctacaaacagctcacgttatggactattagcactctttttactactggaaatacagtcattagtgcctttaaatctaatcagattagagagccaattctagaaaccccagaaccagttcagaaaattcatccttaaaattctgctcctctagaagcactctcagtgccaaaatctatacaaagttttccagagaaacagaacaagaaggagatatctctatatatagatagacatagagatatctccagatatctccttctggtcctgtatatagatagatacagagagctagtctcatccacaaacactctcaaagacacaatgaaaaagagagagggattgattaattgtaaggaattgactcacacgattatggatagtaagtcccatgaccagcctttctgtaagccagagacccaggaaagctcatggtataattaagtctgcatccaaagtcctgagaaccagggaaccaacggtgtgtaaatcccagtctggagatgttccagctcaagcaggcaggcaggaaaccaaaacagggcaaactccttcttcctctgccttttgttctcttcaggccctccatcgatcagatgatgcctgctcacattagggaaggcaatctactttacagaatccaatgtcaatcttagccagaaacacccgcaaagacacatcaggaaataatgtttattctgggtatcccatggctagtcaagttgacagataaaattaaccatttcatgggcatatgactaaactgagcaaccacacagtgatgaaaatgcctgctaaaaggaagagtgtcatctatacagttttgaagttctctagaattctgcttactctattagtccattttcaggttgctgataaagacatacccaagactgggtaatttataaagaaagaggtttaatggactcacagttccatgtggctgaggaggcctcacaatcgtggtggaaggctaaaggcacatcttacatggccacaggcaagagcaaatgagagtttgtgcagggaaactcccctttataaaaccatcagatctctctatctcaagaactgcacagggaagacccaccccccgattcaattacctcccaccgggtccctcccatgacacgtgagaattgtggaagccacaattcaagatgagatttggatggggacacagccaaaccatatcggttacctttctaggttttaggtcaatttcaagatgcatacatcaccaccaagcaactacacagcaaatatactcagtccgtgattctgaaacatgggcatgcatcagagtcacctgggtggcttgttacaatgcagatttctagggtccacccctagagtttctgatttagtcggttttggatgggacctgagatttcctagtgctaacaaatccccaggtgatattgatgctgatcaaaggaatacactttgagaaccagtaaattcaagagtacaattgctacacctgacaatcttcacagccaagagaagctaatctgatctcccttaataaaaccatattattttttttctttctccccccgcccccccaccccgagaaggagtctcgctcggttgcccagactggagtgcagtggcacgatctcggctcactgcaagctccgcctcctggtttcatgccattctcctgcctcagcctcccgagtagctgggactataggtgcccaccaccatgcccggctaatttttttgtatttttagtagagacagggtttcaccatgttagccaggatggtctcgatctcctgacctcacgtgatccacccaccttggcctcccaaactgctgggattacaggcgtgcaccaaacgctcctggccagaaaaccatattctaaggaaagcaaacagttatcacaattacacacttcagcaacctccatctcctctttgctacttaagggatgaaaacatcaactgtgtatgtaaaagttaaatgttgggaaagcggaggaacataagtttttgttttgtttgtagagacagggttctcattatgttacccagccttgtctcaaactcctgggctcaagcactttacctgccttagcctcccaaatgagttctaacactttaaattctgttcatctctgaaaaaatcactgcaaggctgaattcaccgtacgataaagaaatcatgcccacaatgttatttttctagggttcccttttcctcacaaagtggtgccagtggaaagcagcatttcagtaactcctacctttatcctagtttagtgactgatgcattaacatggggtgagtttgattaaagggggcagccaacatttacaggtacaattaaaataggagctatgggctgggcatggaggctcatgcctgtaatcccagcactttgggaggcgaaagcaggtgaccacctgaggtcaggagttcaagaccagcctggccaacatggtgaaaccccatctctactaaaaacacaaaaattagccaggcatggtggcacacacctgtaatctcacctactccagaggttgaagcacaagaatcgcttgaactcaggaggcagaggttgccgaaatcttgagaggttgcggaggagagagtgagcagagatcgtgacactgcactccagcctaggcaacagagagagagtcggtctcaaaaaaaaaaaaaaaaaaaacaaaaaacaaaacataaaaataaaattaggccaggcacagtggctcatgcctgtaatcccagcactttgggaggccaaggtgggcatatcacctgaggtcaggagttcaagactagcctagccaacatggtgaaactccgtctctactaaaaatacaaaaaattagctgggcgtggtagcacacacctgtaatcccaactactggcgaggcagaggcaggagaatcgcttcaacccgggaggcggaggctgcagtgagccaagattgtgccactgcactccagcctaggtgacagagcaagactccgtctcaaaaaataaattaattaaaaaaaaaaaacagaagctatggtgctatcaggaaagggagtaaagatttgctctcattctattctctcctttatgtttcagacagttgaagggactacccaaataccaaaatgatattgaggaggaggcactttgtgatggctaattttatgtgtcagcttgattgggtcaggagtgtccaaacattgggtcagacgttattcaggtgtctggggatgacattaacattggaatcgagagactgagtaaagcctgctgtgcttgggcctcatccaaacagttgaagacctgactagaacaaaatggctgagtatgaaagaactcctgcctcactgttgagcatcacagttgacatcagctgtttcctgcctttagacttgaactgagacatcgcttcttccttctgacttgaactgagacatcacctcttccttcagacttgcacggacacatcagctcttcttgagtctcaagcctgctggttttcgaactagaatttacatcaccagcccttctgggtctccagccatccaactgcaaatcctgggacttgtcagccttcataattgtgtgagtcaattctatactaaatctttatacactcacatactctgttggatctgtttctctggcaatcccttaatacagaactggaccaaaaattccttctaaatcactgtttgctgccttaatttctacctcactaaaaattagcactattcctagcaacctgtctcaaagtcccccatctccccccaacctttttttttttttttttttttgagacagagtctcactctgctgcctaagctggagtgcagtggtgcaatctcagctcactgcaatctctgcctccctggctcaagcgatccttctgcctcagctccccaagtagctgggaccacaggcacacaacatcatgcccagctagtttttgtatttttggtcgagacggggttttgccatgttgcccaggttgctctcaaactcctgggctcaggtgatccacctgtatcagcctcccaaagtgctcagatcacaggcataagccactgcacccggcctcaaagtccctttaaaggacatctgcaacctggcatctcagtacaggtgattcagattcaatgactcagtggtgatttcagccctgttgtgccatcagccctgggagtgaagccaaggttgaggcttgctgaaagtggaacgcatgttcatttagacacccattgtaatattctgggtgatgctaatttttcttgcttaatatcagagaacagagaagttagagatgatatcaaaaatggaaacaacatgtacagtccccataatttgtgaattatggggacagattccatttctgtcttttgtcttgagcttctatgtgagctactacaaaaatgacagggctttctgccctccatttcccccttagtttgcacaacacacacaccccttctcaaacttctgaaagctctcagacatacttttgaaagtaaagaggctatagaggacatatcaatttatctaatagagtaatagcattatgcaggaaatggtaacttgaagagaagcatttgataggcatgaaagagcagcaaagctgcatagcattaacaccccactccactttaagtactgatgtaggtaactgctgcaataattatgccattaagaaagagtgttccaatggccttgatacatgctaccatcggaataaagttaggacattttccttatagttagtgcagtgcgaattgaagaagaccaagaaatgcttttcagagtaagagaggtaccataaagggcctcagagatttgcttctatcaggccaggcacagtgacttatgcctgtaatcccagtattttgggaggccaaggcaggtggatcacttaaggtcaagagtttgagaccagcctggccaacatggtgaaaccctgcctctactaaaaatacaaaaattagctgggcatggtggcacacacctgtagtcccagctactcaggaggctgaggcaggagaattgcttgaacccaggagacggaggttgcagtgagctgagatcatgccaatgcactccagcctgggcaacacagtaagactctgtctcaaaaaaaaaaaaaaaagagattctatcaaaggaggcaggggtatgctattggttactggtgcatattagatgcttgccagatgccaagcctaggtaaacttgtacactagccatgatatgagaagtatgttggggctgatgctggcttcaggagatctacatggtgtgagtctggatcaataaaatgtgaaaattaatggtagcttccatttagtgaataataacatcaatagttaacaactctgggctaggcacagtggctcacgcctgtaatctcagcattttgggaagccgaggcaggcagatcaactgaggtcacaagttcgagaccatcctggccaacatggggaaaccccgtctctactaaaaatacaaaaattagccaggcatggtggtgggcactgtggctgtaatcccagctactggtgaggctgaggcaggagaattgcttgaacctgggacgcggaggttgcagtgagccgagattgcaccactgcactccagcctgggtgacagagtgagactctgtctcaaaaaaaaaaaaaaaaaaaaaaaaagtaacaactctggaaagaaagtattctttgtcttttcttttttcttttcttttttttttttttttgagacaggacctcatattttgttggagtgcactggtgcaatcatacctcactgcagccttgaactcctgggctcgagcaatcctctcacgtcagcctcacaagtagctgccactacaagtgcatgccaccatgcccgaataattttttcagttttattttgtaaagacaatgtctcagcatcttgcccaggctggtcttgaactcctggactcaagagattctcccacctcaatcccccaaagtgctaggattacaggcgtgagtcactgagcttgcccaggctgcttttgaactcctagactaaagagattctgctgcctcaattccccaaagtgttgggatgacaggtgtgagccaccacgcccagccaagggaagaaaatattcttttttttttttttatactttaatttctagggtacatgtgcacaatgtgcaggtttgttacatatgtatacatgtgccatgttggtgtgctgcacccattaactcgtcatttacattaggtatatctcctaatgctgtccctcccccctccccccacaccaagggaagaaaatattcttaagtgacctgcccaaagtcatacagctaataagtggcagagacaagatctgaacctaagtgcttctgattccaaagcctgggcttaaacacaatttgattctgcttgccaaagcattacagctgagtaagctttaaggaaacctcaccaatcggaaccatgcaaaataaagaaatatcagaggcctgagctatcaagtccagtgaggagggtagccacttggccaagaggcccagtattgaacagaaatattcacagtaccttgaatgaaggaggggccaacagtgactcctggtccttgaccaaacttgagtcaggctcctctgaatgctcttcttgaccaggcctcatccttggcctgctgaatctggttctgcaagaatcccccacccttgttactttaccaagttccttgcattacttttccatccactggcccctgcaccttgtccattgtctacaaatccccagctgccactgttatattcagggttgagtcttgacccccaatgcaatagtcttgaaaaaagttttctttgcctacttaacttgttcagcgcaatttttctctgacaggtaaacaatgagggagctccattagcacaaccagagtctttcatccttgccgccccagaggatctggtgtctgggtcaacagactgaccagcacaggaagctcccacaccttcaagttgagtctgccagaggactctccaggttgcattgctgtggggacctttatgcaaggtaaggagacaaaccagggagtcgaaggcaggaggagaggactggaatacaattttaagaaaggagtggctggggctgggcgtggtggctcatgcctgtaatcccagcgctctgagaggccgaggcaggcagatcacctgaggtcaggagttcgagaccagcctggccaacatggtgaaaccccatctctactaataatacaaaattagctgggtgtggtggcatgtgcctgtaatcccagctactggggaggctgaggcacaagaatcacttgaacccaggaggcgggggttgtagtgagccaagatcacgccactgcactccagcctgggcgacagagtgaaactctgtctcaaataaaaaaaaagaaagaaaagaaaagagtggctgggcgtaagcacgcctatagtcccagcactttgggaggccaaggtgggaggattgcttaagtccaggagtttgagaccagcctgggcaacatagtgagactccatcaaaaaaaattagccaggcttggtggtacacgcccatggtcccagctattcaggaggctgaggcaggaggatcacttgagcccagttgtttgagaatgtaggaagccatgatcatgccactgcagtccagcctgggtgacagagtgagacattgtctaaaaacaaaaagaaagaaggaaggaaggaaaagaaaagaaaagaaaagagacagcaagaaagcaagaaagaaccttccggagtttaaactgatgcactgagtacctaagatctctctcatctcccattcaaggacccattgaaatgatgaaaaaggcattttgaaaaagagtgaaataataagaggcgcaaaaagaaaggctgccatcagcaggcaagaaatcttaaaaactcctggagggcagaaagcattaggatgagattgacaaagaagcagacaagaaaaccacagattcaaacgccaccaggaaggccagatcttgaaaagaagtccatggaagcttctaactggatgacgccagacagaaggcacagaagtgcaccatggcaatcattaggataattcattaaagctgggagagttgggactgccagtgtcttaaacacattcagcttttgccctccagctaaacatagaaaacctatccagaaaagaataaaaaagcgtacttggtaattaaggtatgattacagggcataagaaaaaaaatcagatggcaggactgccttccttagaatgtacacaagtaggacaggcacagtggctcatgcctgtaatcccagcactttgggaggttgagatggacggattgcccgagcccaggagtttgagccatgggcaacatggtgagaccgcatctctacaagaaatacaaaaattagcttggtgtggtgccatgtgcctgtagtcccaactacttgggaggctgaggtgggaggatcacttgagcccaggagattgaggctgtagtgagccatgaccacactccagccagggtgacagagcaagaccctgtctcaaaaaaaaaaaaaaaaaaaaagtaaacaagtgacgactgagcttgagatatgaaagtaaaggtggccagacgtggtggctcacgcctataaccccaggactttgggacgcctaggtgggtggatcacctgaggtcaggagtttgagaccagcctggctaacatggcaaaaccccgtctctactaaaaatacaaaaatgagtcaggcatggtggtggcaggcaactgtaatctcagctactcgggaggctgaggcatgagaatcactctaacctgggaggtggagcctgcagtgaactgatgtcacaccatcgcaccccagtctgggcgatagagtgagataccctctcaaaaaaaaaaaaaaaaaaaaaaaaaaaagtaaaggaaaactttcagaataaaaaggaaacagacaaaaataggtaaatgtgagagaaaaggctcaagggtgatagagtcaggtagtccaatattcctttcataggaattccaaaggagacaaagaaggaaggggaggaaatcatcaaagatatgagagaaaaagaccctgagctgaagaggaactcatcttcagattacaatgtccactgactgctgtacagagtgaattaaaaaagacctaatggtgttgcattcttgtgaaatttcagaacgctgggcaattttgaaagcttccggggggagatgtatataaaaaggaaaggaaagggaattaaactgccatcaaatttcatcaacaatactggttgctggaagacaatggaacaatatcttcaaatgcctggggaaaggaatatcttgaactctggattctataaagaatcatccgacacagttcaagaatcaatatgaaaaaaaatattgagacctgtcaaaactcacattgtttaccaccactcattccacgtgaaaaaagtactttaggtgtttgcttactcaaaatgaaaaaagaccccagaggccggatgcagtggctcacgtctgtgagccatgatcacgtcacttcactccagcctgggtgacacagcaagaccctgtctcaaacaaacaaacaaacaaacaaacaaagatggaaagaaagattctgtctctgcccatgcactcaccaagggaaggccacatgggcacacaatgacaggcagccacctgcaagccagggagagggtccctaccagaatgtgaccatgctggcaccctgatcccagacttccatcctccagaatggtgagaaaataaatgccggctgttgaagccacccagcctgctgtggtattttgttagggcagcccaagcagaccatgacagcccgccaaatccgggtctttctctctgctcattctgtaacccactgcctgtcaactgtgtcttcaccaatagtcattccgtcactggtgaagaaggtgtcacctggtcagggcccacgtgtattttcaaaagataaagagacagcaatgttttctcacttattttcttcctcttttcccaggagtctattcacttcgtaacgcctgtctaactgagcagccaaatttagcctgccgccagcaatggcagcctcctcagccctgccccagagaggaaaactgagagacaccagcctctgcctgaaactgtcttgctgaggggaggtttgagaacgctgtcttgtaaagtggaagagattaggggtttcaaagaatagtggtcttcaggccaggcacagtggctcacacctgtaattccagcactttgggaggctgaggtgggcggatcacttgaggtcaggagttcgagaccagcctggccaacatggtgaaacctcgtctctactaaaaatttaaaatttagctgggtgtggtggtgtgcacctgtaattctagctactcaggaggctgagacaggagaattgcttgaacccaggaggtggaggttgcggtgagccaagatcacgccactgtactctagcgtggcgacacagcgagacaccatcacaaataaaaataaaagaataatggtcttcaaatggaggtataagaacacttcctcttcagtacaagggcaccaacagtttgaaaggaattgatttccaggcccgcttttctgcaactgatctgcctgagcccttgcctgcgagggaggggcagggtcttactttccccagtagcccttttctactttataaaaagaagaggacaccccttacccatcctaatcttaccatggcatgtttcctggggcaccaaacccaatcctggtattagtgctgaaccaacatataaccacaaggactgagtaaaatttgcttttgcaaagtcaggggctttccaacatttttcctttccctcaagcctaaggagatctcattgaattgcatgtggatagagcattaaaaattatttttgacgataaatcagcatagggtttttggctcagaatgagctcaaagaattaactgatagtacggtaatacaattatttccatttctatctactttttaattttttggagacagggtttcactctgtcttccaggctagagtgcagtggcacaatcgtggttcactgcagcctcaaacaactgggcaatggtgcaatcgcagctcagctcactgcagcctggacctcctgggttcaaggagctcccacctcagcctccccagtagctgggaccacaggcacgtgccaccacgcctggctaatttttgtattttttagagacaggatttcaccatgttgcccaggctggtctcgaacccctggactctaattatccacccgccttggcctcccaaagtgctgggattacagacgtgaaccaccaagcctggctctactttttatacaaacaggtttcctctgcagtgtcatggagaaacagaattgattctagcagtgagtaggaaccaaacctagacacataaactaactggagaaaaaggccaactgtcccattaaggaagatatttctaacttaaatctaactccctatttaataggacttattcattggaaatacatattgttgttttggccaatttgtattactactactgatgacaacttcatcagaagaaatgattaaacgcttgttcaatggtcacaggaaataaaaatatcaatataggtctatactttttgtgcagtatgatagggtgaccagcaaaagactttcaaggataaaaatatatgtgaggaaaagctgtgtgggaagtggaatggaaattcaaatttagaaaaaaaaatgatataacatttcttatgtttcaaggagagcttgtccaggtattattttaatggatgatggcaggaatcaaacacgatgagattcctttgtataccatcaaaaaaaataataatgtaacaggtttctgtgcatgcgtaggttacactcatatatacacatacatctatacacatatttaaggacctattatttaccctctatagtttatataagtatatattttatattgtattatatatttatacttttcatatttaatattgtttatgtaatatgtgaaacaatatgtaatatatacatttatattttatcttttattttaattttttttttgagaaggagtttcactctgttgcccaggctggagtgcagtggcgcaaccttggctcactgcaacctctgcctcccgggttcaagcaattttcctgccttagcctcctgagtagctgggagtacaggtgcctgccaccacaaccagctaattttttttttgtatttttagtagaggcggggtttcaccatgttggccaggctggtctggaactcctgacctcaaatgatccacccacctcggcctcccaaagtgctgggattacaggcatgagccacctcacctggcctacatatataatttatataacatacagccttaatatcaatacatatgtatactatatatatatgtgtgtttatatacgccccaacatatatatattcatgttaaggctttatatttaggtatgtgtatttagatattttttattatgtatacatatacttatctattcatatgcatatatgcatttgtatttatgctaaagctttatataatacatatattgtgtgtatatgtgtgtgtgtatatatatatataaaacataaagctcatatacataaagcctcaacatgaatatgctctgattgtgatgagattatacagctgtatacaatgaccaaaattatcaaattatacacttcaaattggtagactttattgtatgtaaacaatagaaacaaacaatcacacctgtaatcccagcactttgggaggctgaggcgggcggatcacgaagtcaggagatcgagaccatcctggctaacacgatgaaaccccgtctctactaaaaatacaaaaaattagcctggcgtggtggcaggcacctgtagtcccagcgacttgggaggctgaggcagaagaatagcgtgaacccgggaggcggagcttgcagtgagcagagatcgcgccactgcactccagcctgggcaacagagcaagactctgtctcaaaaaaaaaaaaaaaaaagaaacgaacaaaagagaggaaaactttccccattaaaatagcaatagcaaaaaaaaaaaaaaaaaaaaaaaaaaagccaaaaatcggaatagagggctatttccttagcatgggataagtaagtaatattgtacgtgcctatgtgaggcacacagaatagtgagaatcaaaggcagagagtggagtgggagttgccgggggatggggaatggagagttagtatttagtgggtacagagtttcagttttacaagatgaaaagagttctagagaaggatagtggtgatggttgcacaagattatgaatgtatttaataccactgaactgtacacttaaaagtgattaagatgataaattgtgttatgtatattttaacacaataaaaattgggagtgtgtgtatgtgtatatatatatgtctgtgtgtacacacacacatatatataattgggagtgtgtgtgtatatacagtatgtgtatgtttgtatgagagcttaacgtacatacacttgtgtacatgtctacctaacaacttttttttttttttggagacaaggtctcactgctctgtcgcccgggctggagtgccgcagtgcaatcacagctcactgcagcctcaacctccctagctcaagcaatcctcccacctcagccttgtaagtagctggtactacaggtgtacaccactacactgggctaattttttaaattttctgtagtgatgaggtcttggtatgttacccaggctggtctcaaactcctggcctcaaccgatcttcctgccttggcctcccaaagcactgggattacaggcatgagccgctgtacccggcccaactttattttttaaactaagttgagtgtcaatattgacaatattctgtaaaacatatccttacaactatttaaacgtatagtaaaatgttgcatgtagattgtcaacatgcgagggggcatgcaattttacaaagttctttcaggggatattcaagccaaagagtgtgaaaacccctggacccccaggcagaattagacacaggggagactccagtacagtggcaactgagacaacaaagaaacactgaggacattttcactaccaggatataggcaaacgaaactgcaatgatgtcatgtttgcatatgtggcagatacaaaaagcttaaaagcagctctttgttctcttgctgagtttggggcaggcactggcacaaattgaggaaagtaagtgacaggaccggcagcaattagacttgctgatgttggggcgaccctggggttgcatctgggaaaccgacacccggatccaggatagaagctgacatagaagtaagcaaaactgctgtaggccccggtcaagggctctcctctcaggattcctcccataactacctgaaacaaggatttggaataccttgactttggagagagaaatcgaaatcagttcaactgaactctaatcaggcgtgagaatcctcttgtcattcaagtttaattggcttaatctcccaaatgatactgaaggcagtagtagttcttatgctcctagggtgcagtattatattatttataaatgcagacacttcaaaagcaataaaacacttggcccttgctctcaataaacttgccctctaactgggaggacagcatccaaatggaaaaaaaaaaaaatgaagaacagttcaaagcaacatataagaagtatgtaataatcccccaagagaaacaaagactgcattgcatactttcccagtagaagtacaaattggcacagcaccccatggagggaagtgggccacagagatcagaattacaaatgagtatctcctttgacctggtaatttaacttctgggaatttatccttcagccgtacttaggaaataacatatactctaagttactcactgtagcattgttcaaaataacaaaagattggaaagaaggcaaatatccttgagtagaagactgatgaaatacattgtgctacatacatacaatggaatatttcgaaggtataaaagtgcatgaggagggccgggtgcagtggctcatgcctataatcccagcactttgggaggctgaggtgggtggatcacttgaggttgggagttcaagacaagcctgaaaaacacaacacaaccccatctctactaaaaatacaaaaattagccaggcatggtggtgggcacctgtaatcccagctactcaggaggctgaggcagaagaatcacttgaacccaggaggcagaggttgcagtgagctgagattgtgccactgcactccagcctgggcgacagagcgagctcaaaaaaagagtgcatgaggaaactttcaaggtacagatatttttaaagtctccaagataagtgcgggggcagggggggaacagcaaggtacagaaaaggtgtataagacacttccttttgtttacaaggaagggaaaaaaagaatatagaatatatttttatgtgctttagtattcacaaataaagtctagatgaatacacacagaaatgaaaagctgattacctggagtggattagggagggtgaaaacagggtggatggggctgagcaggagggagacttctgctccatgaaccatgtgactgtgttcctactcaaaacaattaagagaataatgaaaaaatatcccctgctgaggcctgacataataagcaggaagttggtttctgagggacccccccacccaccgtccggtgtcaagcatatgccctcagctttggctggctctgaacagcagggaaaatgtgagagcaggaccacgtggcttctgcacgggcagccctgtgtccaggcccctgcccagctgctgagcttcctgcccggtgcccctgcatcagccagagtccaaccccaccctctcagcctgccctcttgccagcgggctcagaatcagctgtcctcaccagttaccagaatcctcaagcagctggctttaattgtgtctatgggaaggcagaaagaggaagggaaggtcgattaagtaaacctctattaagggaggagtgaagcccaggaggtcaaagagcccaggatagaagcaaggctagctgccaagccaagcttggaactctcccaaaagataccacagagaaatatgcccaaatgtgaatgctactggcttcaagttgtgtaataatgggtaggttttttccccccgggtctttatgctttgatgtgctttccaattttttttttaaataagcacagatgactcttacaaagcaaaaaaatagagtgtacaatgtgaaagatgtatacattaaaaataaaaaccaaaccatgattgttaccaaaccatgtagtccagaaaccttgaaggataaaaaaggaagctcagatggacagcataagaatgttacagctctaaacaaaattaaaatattacaataaaaaaaatgttcccataatgctgaagatgtcattggacagcaggtcagtggggcccacttagtcgggccaggcagagtggagctgtccaaggtgccagagtaagaaagggcagtggatgcagagatgactgcgttactcagtgcactggcaaggccaatagctcctccccagtcttcctcccactgagtttaaaactctctatccagcaattcaaaccactttcttccttatacttgctaaagtccataatgagactgggcacagtggctcatgtctataatttcagcactttgggaggccgaggcaggtggatcacctgaggtcaggagttcaagagcagcctggccaacatggcgaaacctccactttaccaaaaaatacaaaaaaaaattagctgggtgtggtggtggtggtgggcgcctgtagttccacctacttgggaggctgaggtggaagaatcacttgaacccagaggcagaggctgcagtgagccaagatcatgccactgcactccagccttggcaacagagtgagaccctgtctcaaaataaacaaaaaaaaagtaagagagagagagagtgtgaagaaagaaagaaagaaagaaagaaagaaagaaagaccaaccataataatggtcacattcatctcagaaacaacaaataattttttagtcttcatcaattttttttctcagctctttaggggttatgaaaggagtaagcaaatatttaaactatttgaggaggttttaggcatatttgaagctagcaaagtttcccaccatttaacacaaggctttacatgaagtcagtaaaattagatgcaaaatcaagcccctgaatacttgaaaaaatacagtagaccttgacgtgtgcaaggtatttatcccaaaacctttcctaatcccaaggttgggaacagccctatagcaaaaaacttccccctttattagtcaggactcttttgattataaattatagaaactcaaatgacacagaggggaatgaattggaggataaaatttaaaaaatagttgaacaggttgggcgcagtggctcatgcctataatcccagcactttgggaagctgagtcaggcagattacttgaggtcaggagtttaaaaccagcctgggcaacaatggtgaaatcctaaaaatacaaaaattagccgggtgtggtggctcacctgtaatcccagctactcaagaggctgaggcaggagaatcacttgaacctcccaggaggcagaggctgcagcgagccaagatcatgccactgcaccccagactggatgacgggagagaaatcttatctcaaaaaaaaaaaatggttgaacaaccttctgattgctcacagataataaattataaattataaatgaccagggtctagcatgccacagagaaaataagttttaatggcagttgcttccctgaaatggatttattgtctaaaaggcagaaggttctcaatgatcctgcatctggactcatcttgacaccacctgctctttctcacccacccatcatcaactaactcctattatttctaagccaataataggtctccaattagtcccttcctctctctcaactactgtccttgttcaggccgccatcatgaccaggttgaatcattctgtaaatagcagattgagaaatgtgatgcctgggcttgttagctaaatacctattaagaaagaatgatttaggccaggtgcagtagctcatgctacaatcctagtactttgggaggccgaggctggtggatcgcttgagcccaagagttcaagacaagcctaggaaacatagcaaaaccttgtcctctactaaaagtacaaaaaactagccaggtgtggtggcacacacctgtggtcccagctactccagaggctgaggtgggaagatcgcctaagcccagggaggtcaaagatgcagtgagctatgatcgtgccactgcactccagcctgtgcaacaggtgtgagacgctgtctcaaaaaaaaaaaaaaaaaaaaggaagatttttattctcaaggtatattaaagaagactaggaaaatcacaagagcatgggtttcagaatcagatcgttccggcttaaatgtagctctatcacttactctatggatgaccatggcaaagtattcaatctgagttgactttcttataaaataggcataataatatttgtcttgcagaattttttttctttcttctttttcttagacagagtgcctcactctgtcacctaggctggtcttgaattcctggactcaagtgatcctcccaccttggcctcccaaagtgctaggattacaggtgtgagccagcagggctggctttgtgaacttattatgaagattaaatcaggtggaagatttttaaagtgctcaaaatattgagagaatattcaatatatgctgctaatatcagaggcctcatgctaaccttacaaaagtcaataaacaaacacaaggtaaatgatgagggtcagaaaaatacatcggccttactcttctcaccttgctttgcctcccaaacaaaggtctgccaccattttatttctctaagcccaaaaggtttgactaaataatagttctctgtttgccttgttaggcagtgtttgatgtggcaccattacctgaagaatgaagtcaagagtcattcttggaagagggttagaatgtttgaatgttcaggtttgaatgtttgcagaattacaacaaaattggggtatgaaaaagaagatggggctccagaaagtcaaacatctaaagtgtttgttctatattattatatgatatagactgcaatgtggatataataatagaagatggtattagagatgatattacaatattgaacatggattcaacaataatatcttcctgaaagattttttttaaagctagactccccagcctgggcaacatagtaagaccccatctttacaaaatataaaaagttggctagaagtgatggtgagtagtcctagctactcaggtggccaaggtaggagaattgcttgagcccaagaggttgaggccgcagtgagctatgatgatgccactgtactccagcctgggcaacaaagcaagatcctgtctttaaaaaagcaaaacaaaaacaaacaaacaaacaaaaagaataaaaccattcagcacagagtaaactcaatgaaatcaacaaaatctcctaagaatctgaaagccatacaagtttctttttcaccttgtttaataattctcaaaaaccatgactggggaaaccaattctggtattaaaaataaatactgctttctccctttttagctaaactttataagactcagcatctcagaaagaccctcttatattctagagatatgctactgtcttcctagagagcatcagcaaacaactaacttaaaatgtaatcagtgaaaaaatataaaacatttccaaaagaaattttaacaagacccaaataaattgaaagacatcccatgttcatggattggaagacttaatattgttaggatgagaatactatccaaagctttatacagatccaatgcaatccctatcaaaatctcaagagcatcttttgcagaaatgaaaaatcccattctaaaattcataaagaattaagagactcaaaatagccaaaaataatcttgaaaaagaaaaacaaagttggagggctcacatgttctgatttcaaaacgtattacaaagctacagtaatcaaaaaagtgtaatcaaaacagcactaagtgtggtgctggcataaaaatagacatatcaaccaatggaataaaatttagaacccagaaataaacccaaatgtctctagtcaattgatttcagcaagagtgtcaaggccactcaatgggaaaaagagagtgttttcaacaaatggtgctgaaaaaactggatatccacatgcgaaatgaagttagacccttaccctataccatatataaaaactaacagtgaatcaaaagcctaaatttaagaggcagaactataaaactcttaaaagaaaacatggggcaaatctgcatggtcttagattaggcagtggtttcttaagtatgacacttaaaaagcacaggtaacaaaagaatatatagataaactaaactttttgaaaataaaaaacttgtatgcatcaatggacactatcaagagagtaaaaacacaatccacagaatgggagaaaatatgtataaatcatatatcctataagggtttgatgtccagaatacgtaaaaaactcctacaactgaacaacacaaaaacaatcccattttaaaatgtgcaaagggagggattagcaggaaggaagaaatgaataggatgagcacagaggatttttagggcagtaaaactattctatatgctactatcatgtggattcatgtcattatacactcatcaaaacttgcataccaacaccaagagtgacctctaacgtaaatatgcattctgggtgctaatgatatgtcaatttggttaatcaattgtattagatgtaccactctgatgagggatgttgaatgtgggtcagcctatgcatgtgtggaggtgagaggtatatgggaattctctactttctgctcagttttgctgttaacttaaaaactactctaaaaaataatacagtggggagaaaaagaggacaaagagcttgaacagacatttctccaaagaagatatacaaatgaccaataaacacaggaaaagatgctcaacattgctaatcattaaggaaatgcaaatgaaaaccataatgagatagcatttcacacctaagatggctatatatatatatatatggctatatataaatatatctatatattttttttgagacaggatctcactttgtcgtctgggctacagtgcagtggcacgatcatggcttactgcagcctccacctcctggggtcaagtgatcctcccacctcagcctcttgagtagctgagtccataggcatgcaccaccacagccagataatttttttttttgtagctatggggcctccctgtgttgcgcaggctggcctggaactcctgggctcaagcaatcctcccaccttggcctccaaaaatgctgggtttacaggcatgagccacaacaccaggctataatttttttttaaaggaaaatagcaaatgtggaagaggatgtggaaaaatgggaacccttggacattgctggtgggaatgtagcgacgcaaccactgtggaaaacagcttggcagttcctcaagaagttaaacatagaattaccatatgatccagcaacttcactcctatgaaaacacccagaagaagtaaaaaggactcaggcaaatacttgcataccaatgttcattgaggtattattcaccagagccaaaagctagaaacaactgaaatgcccaacatgggaagaaacaaaacgtggttcagtatacatacacacacacacacacacacacagacacacacacacacacacacaatggaatattattcagccgtcaaaattaagctctgatgcatgctacaatatggatggaccttgaagacatgctaaatgaaagaggctagacacaaaaggaccatactgtatgattccacatataggaagagacgcaaattcgtagatacagaagtctaatggtagttgccagaagctgggaggagaaaggaattgggagttattaaccttggttaatgggaagagagttttgtcagagtagtgatgcttgcacagattatgaatgtaatgaatgccactgagttatacacaaaagtggcttaagtgggaaattttatgttatatgtatttcaacacattttttaagagaaaagtaatatgtgcaaaatgacctatgaatacaggaattagagactgttgctggtcaggcatggtggctcatgcttataatcccagcactttggaaggctgaggcaggaggatcacttgagcccaggagtttgagattagcctgggcaacataaggagagcatgtctctacaaaaaataaaaaattagccgggtgtggtggcatatgcctgtagtactagttattctggaacctgaggcgggaagatttcctgagcctaggagttcgaggctgcagtgagtcatgatagtgccactgcactccagcgttggggacaaagttagaccctgtctttgaaaaaaacagaagaaactgttctga

SEQ ID NO: 282 - DNA, 1172 bp, Homo sapiens
gagacattcctcaattgcttagacatattctgagcctacagcagaggaacctccagtctcagcaccatgaatcaaactgcgattctgatttgctgccttatctttctgactctaagtggcattcaaggagtacctctctctagaaccgtacgctgtacctgcatcagcattagtaatcaacctgttaatccaaggtctttagaaaaacttgaaattattcctgcaagccaattttgtccacgtgttgagatcattgctacaatgaaaaagaagggtgagaagagatgtctgaatccagaatcgaaggccatcaagaatttactgaaagcagttagcaaggaaatgtctaaaagatctccttaaaaccagaggggagcaaaatcgatgcagtgcttccaaggatggaccacacagaggctgcctctcccatcacttccctacatggagtatatgtcaagccataattgttcttagtttgcagttacactaaaaggtgaccaatgatggtcaccaaatcagctgctactactcctgtaggaaggttaatgttcatcatcctaagctattcagtaataactctaccctggcactataatgtaagctctactgaggtgctatgttcttagtggatgttctgaccctgcttcaaatatttccctcacctttcccatcttccaagggtactaaggaatctttctgctttggggtttatcagaattctcagaatctcaaataactaaaaggtatgcaatcaaatctgctttttaaagaatgctctttacttcatggacttccactgccatcctcccaaggggcccaaattctttcagtggctacctacatacaattccaaacacatacaggaaggtagaaatatctgaaaatgtatgtgtaagtattcttatttaatgaaagactgtacaaagtataagtcttagatgtatatatttcctatattgttttcagtgtacatggaataacatgtaattaagtactatgtatcaatgagtaacaggaaaattttaaaaatacagatagatatatgctctgcatgttacataagataaatgtgctgaatggttttcaaataaaaatgaggtactctcctggaaatattaagaaagactatctaaatgttgaaagatcaaaaggttaataaagtaattataact

SEQ ID NO: 283 - DNA, 2167 bp, Homo sapiens
acaaggaaagaaaacctatagtggtctatgtctgtcgatgatatctattcagctaacacatgagcattctgccaggcagcacagaaccctaacctacagagagctgcagagaaacaccacggagaggtggaggaggaggatgaagcacttcttaaacagaggtcgactaaccagcaaattcttctttcttcctttttttttcttaaagggatctatattctagcttctaaaaacttgagtctgaacagaaataaaaagaaagagtcgatgctaacatacaaaacactcagcatctctctttatcattttttaaaaggcatgcaattttgacaaatgatacatttctaaaagctttcttctctattcaagatattaatgtccattctgaatgaaagatgcctacatactgcctgcaatcagtttctagcaacagacaccctatgaagcccctagcagggaaggtggggggaagggagggaaactaatagggctgcagttcacaaatcaaaacaagagggccgtcagcaagatttattgatagcagccttgggaatgaaactgggttctccaaagtcgtctgtgacaatctggcaacctctgaaactctttgcttattcgcagttgacatcacttgttagaagagcaactctgaaagaaaacgagcaaattccaaaatatgaaaagattcacaatttcaaggtgcatacattcagagggccacactggtgtgaatactgtgccaactttatgtggggtctcattgctcagggagtgaaatgtgcagattgtggtttgaatgttcataagcagtgttccaagatggtcccaaatgactgtaagccagacttgaagcatgtcaaaaaggtgtacagctgtgaccttacgacgctcgtgaaagcacataccactaagcggccaatggtggtagacatgtgcatcagggagattgagtctagaggtcttaattctgaaggactataccgagtatcaggatttagtgacctaattgaagatgtcaagatggctttcgacagagatggtgagaaggcagatatttctgtgaacatgtatgaagatatcaacattatcactggtgcacttaaactgtacttcagggatttgccaattccactcattacatatgatgcctaccctaagtttatagaatctgccaaaattatggatccggatgagcaattggaaacccttcatgaagcactgaaactactgccacctgctcactgcgaaaccctccggtacctcatggcacatctaaagagagtgaccctccacgaaaaggagaatcttatgaatgcagagaaccttggaatcgtctttggacccacccttatgagatctccagaactagacgccatggctgcattgaatgatatacggtatcagagactggtggtggagctgcttatcaaaaacgaagacattttattttaaatttttaatttgaggggaaaagaaatgttttacagatgaaggaatgttttatagtaatttaatttgctcctgtagctgcattatttcttgattagaggtttgggcatataaccagattaaagtgaaggaactttctgttgtttttgtagcaccgctcagctgtcttgtaaaacagtgaacacacgctttctggttctagtaatcctgggtgtttatcacgttcagagaaactcaagctattgcatgattagccccctatctggcaaggaaaccccatacagaagaaacaacaaacctgcgcctgcaccgcctctgcgtcctgggtagtctgtgcttgtaatccagcatgtttcacagagtaagcctgttgtgactttgcttttggggtctatgtcattggtttctgatgcttgtacaaacacgcacacacaaatggataaaacagcacctctggctgttacattaccataaaccatatcacatgcctacattttacaaatgatttctggtttctcttagttcttctctaacatagtactttctttccagcaaaagcaaaatgtgttttcagatttgttactttaataaaggttatccataccaataaaaagtgtacaacacagcattttctgttaaattattattggttttcagttgtaatttggtattttttctggcatgcgtttattaatttattaaattggcttttagaaat

SEQ ID NO: 284 - DNA, 987 bp, Homo sapiens
catgtaaaaatgtgctcctcttaatgtaagcattttctcattttatgaaaaaattccccctgtgtcagtttaatgttttctcaattgtcagttttatgggttatcacaatgttttgattattcctttctggaataactgtgagttatggagcacacttaaggactttccaaatgttggctgtttctaacttggcgctgagcgcctttggccgcctttccgatgatgccctcgggacgcgttggcaggaggaatccctgggcgcaaggcgcggctgggccagccccttacaaagccctacgagctgcggggacccaggccggggcagcgggggccacgccccatctccgaccccacggggaccgggccgggactgcgccagcgggggcctcgccccgtctctgaccccagaggaaccggcagcgggcagcacgcgtgggcctctccccgcgggacgccggacgcgcagccagacgcgctccccaggccccctccgagagcgaggacgcgcccaggcccgctctgccggagccgccactggggggcgtagcgcggacgcgcacccttgcctcgggcgcctgcgcgggaggccgcgtcacgtgacccaccgcggccccgccccgcgacgagctcccgccggtcacgtgacccgcctctgcgcgcccccgggcacgaccccggagtctccgcgggcggccagggcgcgcgtgcgcggaggtgagccgggccggggctgcggggcttccctgagcgcgggccgggtcggtggggcggtcggctgcccgcgccggcctctcagttgggaaagctgaggttgtcgccggggccgcgggtggaggtcggggatgaggcagcaggtaggacagtgacctcggtgacgcgaaggaccccggccacctctaggttctcctcgtccgcccgttgttcagcgagggaggctctgggcctgccgcagctgacggggaaactgaggcacggagcgggtagag

SEQ ID NO: 285 - DNA, 5434 bp, Homo sapiens
cgtccgcgtggggggggtgtgtgcccgccttgcgcatgcgtgttccctgggcatggccggctccgttccatccttctgcacagggtatcgcctctctccgtttggtacatcccctcctcccccacgcccggactggggtggtagacgcgcctccgctcatcgcccctccccatcggtttccgcgcgaaaagccggggcgcctgcgctgccgccgccgcgtctgctgaagcctccgagatgccggcgcgtaccgccccagcccgggtgcccacactggccgtcccggccatctcgctgcccgacgatgtccgcaggcggctcaaagatttggaaagagacagcttaacagaaaaggaatgtgtgaaggagaaattgaatctcttgcacgaatttctgcaaacagaaataaagaatcagttatgtgacttggaaaccaaattacgtaaagaagaattatccgaggagggctacctggctaaagtcaaatcccttttaaataaagatttgtccttggagaacggtgctcatgcttacaaccgggaagtgaatggacgtctagaaaacgggaaccaagcaagaagtgaagcccgtagagtgggaatggcagatgccaacagcccccccaaacccctttccaaacctcgcacgcccaggaggagcaagtccgatggagaggctaagcctgaaccttcacctagccccaggattacaaggaaaagcaccaggcaaaccaccatcacatctcattttgcaaagggccctgccaaacggaaacctcaggaagagtctgaaagagccaaatcggatgagtccatcaaggaagaagacaaagaccaggatgagaagagacgtagagttacatccagagaacgagttgctagaccgcttcctgcagaagaacctgaaagagcaaaatcaggaacgcgcactgaaaaggaagaagaaagagatgaaaaagaagaaaagagactccgaagtcaaaccaaagaaccaacacccaaacagaaactgaaggaggagccggacagagaagccagggcaggcgtgcaggctgacgaggacgaagatggagacgagaaagatgagaagaagcacagaagtcaacccaaagatctagctgccaaacggaggcccgaagaaaaagaacctgaaaaagtaaatccacagatttctgatgaaaaagacgaggatgaaaaggaggagaagagacgcaaaacgacccccaaagaaccaacggagaaaaaaatggctcgcgccaaaacagtcatgaactccaagacccaccctcccaagtgcattcagtgcgggcagtacctggacgaccctgacctcaaatatgggcagcacccaccagacgcggtggatgagccacagatgctgacaaatgagaagctgtccatctttgatgccaacgagtctggctttgagagttatgaggcgcttccccagcacaaactgacctgcttcagtgtgtactgtaagcacggtcacctgtgtcccatcgacaccggcctcatcgagaagaatatcgaactcttcttttctggttcagcaaaaccaatctatgatgatgacccgtctcttgaaggtggtgttaatggcaaaaatcttggccccataaatgaatggtggatcactggctttgatggaggtgaaaaggccctcatcggcttcagcacctcatttgccgaatacattctgatggatcccagtcccgagtatgcgcccatatttgggctgatgcaggagaagatctacatcagcaagattgtggtggagttcctgcagagcaattccgactcgacctatgaggacctgatcaacaagatcgagaccacggttcctccttctggcctcaacttgaaccgcttcacagaggactccctcctgcgacacgcgcagtttgtggtggagcaggtggagagttatgacgaggccggggacagtgatgagcagcccatcttcctgacgccctgcatgcgggacctgatcaagctggctggggtcacgctgggacagaggcgagcccaggcgaggcggcagaccatcaggcattctaccagggagaaggacaggggacccacgaaagccaccaccaccaagctggtctaccagatcttcgatactttcttcgcagagcaaattgaaaaggatgacagagaagacaaggagaacgcctttaagcgccggcgatgtggcgtctgtgaggtgtgtcagcagcctgagtgtgggaaatgtaaagcctgcaaggacatggttaaatttggtggcagtggacggagcaagcaggcttgccaagagcggaggtgtcccaatatggccatgaaggaggcagatgacgatgaggaagtcgatgataacatcccagagatgccgtcacccaaaaaaatgcaccaggggaagaagaagaaacagaacaagaatcgcatctcttgggtcggagaagccgtcaagactgatgggaagaagagttactataagaaggtgtgcattgatgcggaaaccctggaagtgggggactgtgtctctgttattccagatgattcctcaaaaccgctgtatctagcaagggtcacggcgctgtgggaggacagcagcaacgggcagatgtttcacgcccactggttctgcgctgggacagacacagtcctcggggccacgtcggaccctctggagctgttcttggtggatgaatgtgaggacatgcagctttcatatatccacagcaaagtgaaagtcatctacaaagccccctccgaaaactgggccatggagggaggcatggatcccgagtccctgctggagggggacgacgggaagacctacttctaccagctgtggtatgatcaagactacgcgagattcgagtcccctccaaaaacccagccaacagaggacaacaagttcaaattctgtgtgagctgtgcccgtctggctgagatgaggcaaaaagaaatccccagggtcctggagcagctcgaggacctggatagccgggtcctctactactcagccaccaagaacggcatcctgtaccgagttggtgatggtgtgtacctgccccctgaggccttcacgttcaacatcaagctgtccagtcccgtgaaacgcccacggaaggagcccgtggatgaggacctgtacccagagcactaccggaaatactccgactacatcaaaggcagcaacctggatgcccctgagccctaccgaattggccggatcaaagagatcttctgtcccaagaagagcaacggcaggcccaatgagactgacatcaaaatccgggtcaacaagttctacaggcctgagaacacccacaagtccactccagcgagctaccacgcagacatcaacctgctctactggagcgacgaggaggccgtggtggacttcaaggctgtgcagggccgctgcaccgtggagtatggggaggacctgcccgagtgcgtccaggtgtactccatgggcggccccaaccgcttctacttcctcgaggcctataatgcaaagagcaaaagctttgaagatcctcccaaccatgcccgtagccctggaaacaaagggaagggcaagggaaaagggaagggcaagcccaagtcccaagcctgtgagccgagcgagccagagatagagatcaagctgcccaagctgcggaccctggatgtgttttctggctgcggggggttgtcggagggattccaccaagcaggcatctctgacacgctgtgggccatcgagatgtgggaccctgcggcccaggcgttccggctgaacaaccccggctccacagtgttcacagaggactgcaacatcctgctgaagctggtcatggctggggagaccaccaactcccgcggccagcggctgccccagaagggagacgtggagatgctgtgcggcgggccgccctgccagggcttcagcggcatgaaccgcttcaattcgcgcacctactccaagttcaaaaactctctggtggtttccttcctcagctactgcgactactaccggccccggttcttcctcctggagaatgtcaggaactttgtctccttcaagcgctccatggtcctgaagctcaccctccgctgcctggtccgcatgggctatcagtgcaccttcggcgtgctgcaggccggtcagtacggcgtggcccagactaggaggcgggccatcatcctggccgcggcccctggagagaagctccctctgttcccggagccactgcacgtgtttgctccccgggcctgccagctgagcgtggtggtggatgacaagaagtttgtgagcaacataaccaggttgagctcgggtcctttccggaccatcacggtgcgagacacgatgtccgacctgccggaggtgcggaatggagcctcggcactggagatctcctacaacggggagcctcagtcctggttccagaggcagctccggggcgcacagtaccagcccatcctcagggaccacatctgtaaggacatgagtgcattggtggctgcccgcatgcggcacatccccttggccccagggtcagactggcgcgatctgcccaacatcgaggtgcggctctcagacggcaccatggccaggaagctgcggtatacccaccatgacaggaagaacggccgcagcagctctggggccctccgtggggtctgctcctgcgtggaagccggcaaagcctgcgaccccgcagccaggcagttcaacaccctcatcccctggtgcctgccccacaccgggaaccggcacaaccactgggctggcctctatggaaggctcgagtgggacggcttcttcagcacaaccgtcaccaaccccgagcccatgggcaagcagggccgcgtgctccacccagagcagcaccgtgtggtgagcgtgcgggagtgtgcccgctcccagggcttccctgacacctaccggctcttcggcaacatcctggacaagcaccggcaggtgggcaatgccgtgccaccgcccctggccaaagccattggcttggagatcaagctttgtatgttggccaaagcccgagagagtgcctcagctaaaataaaggaggaggaagctgctaaggactagttctgccctcccgtcacccctgtttctggcaccaggaatccccaacatgcactgatgttgtgtttttaacatgtcaatctgtccgttcacatgtgtggtacatggtgtttgtggccttggctgacatgaagctgttgtgtgaggttcgcttatcaactaatgatttagtgatcaaattgtgcagtactttgtgcattctggattttaaaagttttttattatgcattatatcaaatctaccactgtatgagtggaaattaagactttatgtagtttttatatgttgtaatatttcttcaaataaatctctcctataaaccaaaaaaaaaaaaaaaaaaaaaaaaaa

SEQ ID NO: 286 - DNA, 2440 bp, Homo sapiens
cttgagcgcctcttccggttaccttttcccagcgccagaggcgcctagggttggggtcctcgctcaggcacagagacccgacaccgagcggcggcttccccgggatcgagggacgcgcacgccagaggagacgaaaggaacccgggtcggaccagatcggaaccactgaccattgcccatggcggccctaggccctagcagccagaatgtcactgaatacgtcgttcgagttcctaagaatacaaccaaaaaatataacatcatggcttttaatgcagccgacaaagtcaactttgctacgtggaatcaggctcggctggagcgggacttgagcaacaagaaaatctaccaagaggaggagatgcccgaatcgggcgcgggcagtgagttcaaccgcaagcttcgggaggaggctcggaggaagaagtacggcatcgtcctcaaggagttccggcccgaggaccagccctggctgctccgggtcaacggcaaatcaggcaggaagttcaagggcatcaagaagggaggcgtaacagagaacacgtcctactacatcttcacccagtgccccgacggggccttcgaggccttccccgtgcacaactggtacaatttcacaccgctggcccggcatcgcacgctcactgccgaggaggccgaggaggagtgggagaggaggaacaaggtgctgaaccacttcagcatcatgcagcagcggcggctcaaggatcaggaccaggacgaggatgaggaggagaaggagaaacgtggccgcaggaaggcgagcgagctgcgcatccacgacctggaggacgacctggagatgtcgtccgatgccagtgatgccagtggtgaggaggggggcagagtccccaaggccaagaagaaggcgccgctggccaagggcggcaggaaaaagaagaagaagaagggttcagacgacgaggccttcgaggacagcgatgatggggacttcgagggccaagaggtggactacatgtcagacggctccagtagctcccaagaagagcctgagagcaaggccaaggcgccgcagcaggaggaggggcccaagggtgtcgatgagcagagcgacagtagtgaggagagtgaggaggagaagccgcctgaggaggacaaggaggaggaggaggagaagaaggcacccaccccgcaggagaagaagcgcaggaaagacagcagcgaggagtcggacagctcagaggagagcgacattgacagcgaggcctcctcagccttcttcatggcgaagaagaagacgccacccaagagagagcggaagccgtcgggagggagctcaaggggcaacagccgcccaggcacgcccagcgcagagggtggcagcacctcctccaccctgcgggcggctgccagcaaactcgagcaagggaagcgggtgagcgagatgcctgcagccaagcggttgcggctggacacgggaccccagagcctgtctgggaagtcgacaccccagccaccatcaggcaagacaacacccaacagcggcgacgtgcaggtgactgaggatgccgtgcgccgctacctgacacggaagcccatgaccactaaggacctgctgaaaaagttccagaccaagaagacagggctgagcagcgagcagacagtgaacgtgttggcccagatcctcaagcgactcaaccccgagcgcaagatgatcaacgacaaaatgcacttctccctcaaggagtgaggcttggtccaatacatggctctgccccccagaacttaaggctctcactgccccttcgccatcctagagtgaggctctgtccaatacatggctctgccctccagaacttcaggctctcagtgacccttcgacatcctgcttgctccctgactcccagggccccgtagttagcaattctggaaaagttaagccatctcctcctctggcccttccttctggaatcttcagatgcctgttaggccttcttattgtcctcctcctcctggctcggcctccctcacactgaccaagggcctgtgctgcccactgggtaacttctacagttctcccttccacttccctaagtctctcttcagctgtgacttatccaccacatagcccagtaagtcttcagttttggctgggcatgatggtgagcgcctgcagtcccagctacttgggaggctaagcccagttcaaggctgcagtgaactatgatggtgccactgcattccagcctgggtgacagaatgaaatcctggcacaaaaaaaaaaaagtagccaggcatggtggcgggagcctgttgtcccagctgttccgtaggctgaggcacgagattcacttgaacctgggaggtggaggttgctgtgagctgacaccacgccactgcactccagcctgggtgacagtgagactctgtctcaataaataaaaaataataataaatt

SEQ ID NO: 287 - DNA, 4780 bp, Homo sapiens
gccccgagtagtgagtggccccgcgcagggtctggagagtcaccgcggcggcgccgggtggtggttaaaccatgttaaggaggattttacagaggactcctgggagagttggctctcaaggttctgatttagattcatcagcaactcctataaacacagtggacgtcaataatgaaagctcttcagagggtttcatatgtccccagtgtatgaaatctcttggatctgctgatgaacttttcaaacattatgaagctgttcatgatgctggtaatgactcaggtcatggaggagagtctaatcttgctttgaagcgagatgatgtaacactgctcagacaagaggtccaagacctacaggcttcacttaaggaagaaaaatggtactcggaagaattaaagaaggaattagaaaaatatcaagggctgcagcagcaagaggccaaacctgatgggttggtgactgattcatcagcagaactacagtctttggaacagcaattagaagaagcccaaacagaaaattttaatattaagcaaatgaaagacttatttgaacagaaagcagcccaacttgctactgaaattgcagatataaagtcaaagtatgatgaagaaaggagtcttcgagaagctgctgaacaaaaagtgacacgtctgacagaagaattaaacaaagaggcaactgtaattcaagatctgaagacggaactgcttcagagacctggtatagaagatgttgccgtgctaaagaaagaactggtccaagttcaaacactaatggataacatgaccttggaacgtgagcgagaatctgaaaaactcaaagatgaatgcaaaaaattgcagtcacaatatgctagctcagaggccacaataagccagctaaggagtgaacttgccaaaggcccccaggaagttgctgtatatgtacaggaactacaaaaactgaaaagttcagttaatgaattaacacaaaaaaatcagaccttgacagaaaacttgctgaaaaaagaacaagactatactaagttagaggagaaacataatgaagaatctgtgagtaaaaagaatattcaggcaacccttcatcaaaaagacctagattgtcaacagcttcagtcaagattgtctgcatctgaaacctcactgcatagaatacatgtagaactaagtgaaaaaggagaagctactcaaaagctcaaagaagaattatctgaggtagagaccaagtaccagcatctaaaggcggagtttaagcagctacaacaacagagagaagaaaaggagcagcatgggttacaactccaaagtgaaattaatcaattacatagcaaacttctggagacagagcgccaactaggggaagctcatggtaggctgaaggaacagagacagctttcaagtgaaaagttgatggataaagaacaacaagtggctgatttacaactcaaactttctcggttagaagagcagttgaaggaaaaagttacaaattctacagaattgcagcatcaattagataaaacaaagcaacagcatcaagaacaacaggctcttcagcaaagcaccacggcaaaacttcgagaagctcagaatgatttggaacaagttctacgtcaaattggcgataaggaccaaaagatccagaaccttgaagctttattacagaagagtaaagaaaatatttcattactagaaaaagaaagagaagatctttatgcaaaaattcaggctggtgaaggagagactgctgttcttaaccagttacaagaaaaaaaccatacactacaggagcaagtaactcaactaacagagaagctgaagaatcagtcagaaagtcataaacaagcccaggagaatttgcatgaccaggtacaagagcagaaggcacatcttagagctgcacaagaccgtgtcctttccctagaaactagtgtcaatgaattaaatagtcaattaaatgaaagcaaggagaaggtctcccagcttgacatacagattaaagccaaaaccgaactattactatcagcagaagcagcaaaaactgctcaaagagctgatcttcagaatcatttggacacagctcaaaatgcattacaagataaacagcaggagttaaataagattactactcagttggatcaggtcactgcaaagttacaagacaagcaagaacattgcagtcagctggaaagtcatcttaaagaatataaagagaaatacctctctttagaacagaaaaccgaagagctagaaggtcaaattaagaaactagaagctgatagtcttgaagttaaagcaagcaaggagcaggctttgcaagatctacaacagcaaagacagctgaacacagatttagagctcagagccacagaattgagtaaacaacttgaaatggagaaggaaatagtatccagtacaagattggatctacagaaaaaatctgaagcccttgaaagtatcaagcaaaagcttaccaagcaagaggaagaaaaacaaatcctgaaacaagattttgaaactttaagtcaagaaacaaagattcagcatgaggaattgaataacagaattcaaacaacagtaacagaactacaaaaagtgaaaatggagaaagaagctttaatgacagagctttctacagtaaaggacaaactatcaaaagtttctgattctttgaaaaactctaaaagtgaatttgaaaaggagaatcagaaaggaaaagccgctatattagacttggaaaaaacttgcaaagaattaaagcatcaacttcaagtgcagatggaaaacacacttaaggaacagaaggaactgaaaaagtcacttgaaaaagagaaggaggcttctcatcagttgaaattggaactcaattcaatgcaggaacaacttatacaggcccagaatactttaaaacaaaatgaaaaagaagagcaacaacttcaggggaacataaatgagctaaagcaatcaagtgaacagaagaaaaaacaaattgaagcactccaaggagagcttaaaattgctgttttacagaagacagagcttgagaataaactacagcagcagttaacacaggcagcccaggaacttgcagcagagaaagagaaaatatcagtattacaaaacaactatgaaaaaagtcaggaaactttcaaacagcttcaatctgatttctatgggagggaatctgaacttctagccaccaggcaagatcttaagtctgtagaagagaagctttctctagcacaggaggacttgatttcaaacagaaatcaaattggaaatcaaaataaattgattcaagaactgaagactgccaaggctacattggagcaggattcagcaaagaaagaacagcaattgcaggagcgatgtaaagcactacaagacattcagaaagaaaagtcactgaaagaaaaagaactggtaaatgagaagtctaaattggcagagatagaagaaattaaatgtagacaagaaaaagaaatcactaaactaaacgaagaactcaagtcccacaaactagaaagcataaaggagataacaaatcttaaagatgctaaacagcttctaattcagcagaaattagaacttcaaggaaaagcggactccctgaaggcagctgttgaacaggagaagagaaatcagcagatactaaaagaccaggtgaaaaaggaagaagaggagctgaagaaagaatttattgagaaagaagctaagttgcattccgaaataaaagaaaaggaagtaggaatgaagaagcatgaagaaaatgaggctaaacttaccatgcagattacagcattaaatgaaaacttaggcactgtgaagaaggagtggcaatctagtcaacggagagttagtgagcttgagaaacaaacggatgacttacggggtgaaattgcagtattagaagcaacggttcagaataatcaagatgaaaggagagcactactggaaagatgtcttaaaggagaaggtgaaatagaaaagcttcaaaccaaagtattagaattgcaaagaaagctggataatacaactgcagcagtgcaggagctgggcagagaaaaccaatcacttcagatcaaacatacacaagcgttgaatagaaagtgggccgaagacaatgaagtacaaaactgtatggcctgtgggaaaggcttttcagtaacagtgagacggcatcactgccgacagtgtggaaatatcttctgtgctgaatgttcagccaaaaatgccttaactccttcctccaagaagcctgttcgtgtctgtgatgcatgtttcaatgacttgcaaggataatgggttatcacaacttcagagtaatattacactaacattagatttttaataaatgtacttaatagaggtcttggactactatttggtttggacactggttgcaatactagaccaaataggaattagtatattttggaatgttatggatatcaagtaaaactcttctatttttgtgagacttgggcttatcatctttcattacttttttcccatttagcccctggaatagctttcatgccaagtttagaattagccaatgaaatgtaaataaactttggacagaaaatagcaatgtatttttttaatataatttcattattcacaaatgaagaatgcaattccatagcttacttctttctcctaaatttaatgtacaaaaatgtacatggatgatattatcacttgttgctgtttttgttgcacaatagcacattaattatattaaatattctctttgtgaagttaaaaaaaaa

SEQ ID NO: 288 - DNA, 6417 bp, Homo sapiens
gcggctccgggtgactcgggccagtgtagaggtcctcaggccgccggcaggagcagctgggccaattccctggccgggagcggaaggggatggcgtcgggcctgggctccccgtccccctgctcggcgggcagtgaggaggaggatatggatgcacttttgaacaacagcctgcccccaccccacccagaaaatgaagaggacccagaagaggatttgtcagaaacagagactccaaagctcaagaagaagaaaaagcctaagaaacctcgggaccctaaaatccctaagagcaagcgccaaaaaaaggagcgtatgctcttatgccggcagctgggggacagctctggggaggggccagagtttgtggaggaggaggaagaggtggctctgcgctcagacagtgagggcagcgactatactcctggcaagaagaagaagaagaagcttggacctaagaaagagaagaagagcaaatccaagcggaaggaggaggaggaggaggatgatgatgatgatgattcaaaggagcctaaatcatctgctcagctcctggaagactggggcatggaagacattgaccacgtgttctcagaggaggattatcgaaccctcaccaactacaaggccttcagccagtttgtcagacccctcattgctgccaaaaatcccaagattgctgtctccaagatgatgatggttttgggtgcaaaatggcgggagttcagtaccaataaccccttcaaaggcagttctggggcatcagtggcagctgcggcagcagcagcggtagctgtggtggagagcatggtgacagccactgaggttgcaccaccacctccccctgtggaggtgcctatccgcaaggccaagaccaaggagggcaaaggtcccaatgctcggaggaagcccaagggcagccctcgtgtacctgatgccaagaagcctaaacccaagaaagtagctcccctgaaaatcaagctgggaggttttggttccaagcgtaagagatcctcgagtgaggatgatgacttagatgtggaatctgacttcgatgatgccagtatcaatagctattctgtttctgatggttccaccagccgtagtagccgcagccgcaagaaactccgaaccactaaaaagaaaaagaaaggcgaggaggaggtgactgctgtggatggttatgagacagaccaccaggactattgcgaggtgtgccagcaaggcggtgagatcatcctgtgtgatacctgtccccgtgcttaccacatggtctgcctggatcccgacatggagaaggctcccgagggcaagtggagctgcccacactgcgagaaggaaggcatccagtgggaagctaaagaggacaattcggagggtgaggagatcctggaagaggttgggggagacctcgaagaggaggatgaccaccatatggaattctgtcgggtctgcaaggatggtggggaactgctctgctgtgatacctgtccttcttcctaccacatccactgcctgaatcccccacttccagagatccccaacggtgaatggctctgtccccgttgtacgtgtccagctctgaagggcaaagtgcagaagatcctaatctggaagtggggtcagccaccatctcccacaccagtgcctcggcctccagatgctgatcccaacacgccctccccaaagcccttggaggggcggccagagcggcagttctttgtgaaatggcaaggcatgtcttactggcactgctcctgggtttctgaactgcagctggagctgcactgtcaggtgatgttccgaaactatcagcggaagaatgatatggatgagccaccttctggggactttggtggtgatgaagagaaaagccgaaagcgaaagaacaaggaccctaaatttgcagagatggaggaacgcttctatcgctatgggataaaacccgagtggatgatgatccaccgaatcctcaaccacagtgtggacaagaagggccacgtccactacttgatcaagtggcgggacttaccttacgatcaggcttcttgggagagtgaggatgtggagatccaggattacgacctgttcaagcagagctattggaatcacagggagttaatgaggggtgaggaaggccgaccaggcaagaagctcaagaaggtgaagcttcggaagttggagaggcctccagaaacgccaacagttgatccaacagtgaagtatgagcgacagccagagtacctggatgctacaggtggaaccctgcacccctatcaaatggagggcctgaattggttgcgcttctcctgggctcagggcactgacaccatcttggctgatgagatgggccttgggaaaactgtacagacagcagtcttcctgtattccctttacaaggagggtcattccaaaggccccttcctagtgagcgcccctctttctaccatcatcaactgggagcgggagtttgaaatgtgggctccagacatgtatgtcgtaacctatgtgggtgacaaggacagccgtgccatcatccgagagaatgagttctcctttgaagacaatgccattcgtggtggcaagaaggcctcccgcatgaagaaagaggcatctgtgaaattccatgtgctgctgacatcctatgaattgatcaccattgacatggctattttgggctctattgattgggcctgcctcatcgtggatgaagcccatcggctgaagaacaatcagtctaagttcttccgggtattgaatggttactcactccagcacaagctgttgctgactgggacaccattacaaaacaatctggaagagttgtttcatctgctcaactttctcacccccgagaggttccacaatttggaaggttttttggaggagtttgctgacattgccaaggaggaccagataaaaaaactgcatgacatgctggggccgcacatgttgcggcggctcaaagccgatgtgttcaagaacatgccctccaagacagaactaattgtgcgtgtggagctgagccctatgcagaagaaatactacaagtacatcctcactcgaaattttgaagcactcaatgcccgaggtggtggcaaccaggtgtctctgctgaatgtggtgatggatcttaagaagtgctgcaaccatccatacctcttccctgtggctgcaatggaagctcctaagatgcctaatggcatgtatgatggcagtgccctaatcagagcatctgggaaattattgctgctgcagaaaatgctcaagaaccttaaggagggtgggcatcgtgtactcatcttttcccagatgaccaagatgctagacctgctagaggatttcttggaacatgaaggttataaatacgaacgcatcgatggtggaatcactgggaacatgcggcaagaggccattgaccgcttcaatgcaccgggtgctcagcagttctgcttcttgctttccactcgagctgggggccttggaatcaatctggccactgctgacacagttattatctatgactctgactggaacccccataatgacattcaggcctttagcagagctcaccggattgggcaaaataaaaaggtaatgatctaccggtttgtgacccgtgcgtcagtggaggagcgcatcacgcaggtggcaaagaagaaaatgatgctgacgcatctagtggtgcggcctgggctgggctccaagactggatctatgtccaaacaggagcttgatgatatcctcaaatttggcactgaggaactattcaaggatgaagccactgatggaggaggagacaacaaagagggagaagatagcagtgttatccactacgatgataaggccattgaacggctgctagaccgtaaccaggatgagactgaagacacagaattgcagggcatgaatgaatatttgagctcattcaaagtggcccagtatgtggtacgggaagaagaaatgggggaggaagaggaggtagaacgggaaatcattaaacaggaagaaagtgtggatcctgactactgggagaaattgctgcggcaccattatgagcagcagcaagaagatctagcccgaaatctgggcaaaggaaaaagaatccgtaaacaggtcaactacaatgatggctcccaggaggaccgagattggcaggacgaccagtccgacaaccagtccgattactcagtggcttcagaggaaggtgatgaagactttgatgaacgttcagaagctccccgtaggcccagtcgtaagggcctgcggaatgataaagataagccattgcctcctctgttggcccgtgttggtgggaatattgaagtacttggttttaatgctcgtcagcgaaaagcctttcttaatgcaattatgcgatatggtatgccacctcaggatgcttttactacccagtggcttgtaagagacctgcgaggcaaatcagagaaagagttcaaggcatatgtctctcttttcatgcggcatttatgtgagccgggggcagatggggctgagacctttgctgatggtgtcccccgagaaggcctgtctcgccagcatgtccttactagaattggtgttatgtctttgattcgcaagaaggttcaggagtttgaacatgttaatgggcgctggagcatgcctgaactggctgaggtggaggaaaacaagaagatgtcccagccagggtcaccctccccaaaaactcctacaccctccactccaggggacacgcagcccaacactcctgcacctgtcccacctgctgaagatgggataaaaatagaggaaaatagcctcaaagaagaagagagcatagaaggagaaaaggaggttaaatctacagcccctgagactgccattgagtgtacacaggcccctgcccctgcctcagaggatgaaaaggtcgttgttgaaccccctgagggagaggagaaagtggaaaaggcagaggtgaaggagagaacagaggaacctatggagacagagcccaaaggtgctgctgatgtagagaaggtggaggaaaagtcagcaatagatctgacccctattgtggtagaagacaaagaagagaagaaagaagaagaagagaaaaaagaggtgatgcttcagaatggagagacccccaaggacctgaatgatgagaaacagaagaaaaatattaaacaacgtttcatgtttaacattgcagatggtggttttactgagttgcactccctttggcagaatgaagagcgggcagccacagttaccaagaagacttatgagatctggcatcgacggcatgactactggctgctagccggcattataaaccatggctatgcccggtggcaagacatccagaatgacccacgctatgccatcctcaatgagcctttcaagggtgaaatgaaccgtggcaatttcttagagatcaagaataaatttctagctcgaaggtttaagctcttagaacaagctctggtgattgaggaacagctgcgccgggctgcttacttgaacatgtcagaagacccttctcacccttccatggccctcaacacccgctttgctgaggtggagtgtttggcggaaagtcatcagcacctgtccaaggagtcaatggcaggaaacaagccagccaatgcagtcctgcacaaagttctgaaacagctggaagaactgctgagtgacatgaaagctgatgtgactcgactcccagctaccattgcccgaattcccccagttgctgtgaggttacagatgtcagagcgtaacattctcagccgcctggcaaaccgggcacccgaacctaccccacagcaggtagcccagcagcagtgaagatgcagactgataccacctccaccgctgagcagtgaccttcctcactttctcttgtcccagcttctcccctgggggcctgagagaccctcaccttccttctgcccatcttccatgttgtaaaggaacagccccagtgcactgggggaggggagggagtgaggggcagtggtgcccttcctgcagaagagacatgcagcagtagcgctggcgccatctgcaggagctggcgggctggccttctggaccctggcttctccccactgtaacgcctgttacacacaaactgttgtgggttcctgccaggcttgaagaaaatgatctgaattttttcctccttttggttttattttgttggtttattttgtgttttcttttctcctttttggggggtattcagagtgggctgggcccctgggcgagacacagctacctctgttggcatctttttaataccaggaacccagcggctctagccactgagcggctaaatgaaataaagtggaaaaaaaaaaaaaaggaaaaaaccaaaagcataaaaaaccacagcaaatttcttgatgaaaattgaaaataaaagtttccttgt

SEQ ID NO: 289 - DNA, 1559 bp, Homo sapiens
cgcagggcaggatgtacacgctgctgtcgggcttgtacaagtacatgtttcagaaggacgagtactgcatcctgatcctgggcctggacaatgctgggaagacgaccttcctggagcagtcgaaaacccgatttaacaagaactacaaggggatgagtctatccaaaatcaccaccaccgtgggcctaaacatcggcactgtggatgtgggaaaggctcggctcatgttctgggacttaggagggcaggaagagctgcagtctttgtgggacaagtattatgcggagtgtcacggcgtcatctacgtcattgactccaccgacgaggagaggctggctgagtccaagcaggcgtttgagaaggtggtgaccagcgaggcgctgtgcggtgtccccgtcttggtgctggccaacaagcaggatgtggagacgtgcctctcaatccctgacatcaagacggccttcagcgactgcaccagcaagatcggcaggcgcgattgcctgacccaggcctgctcggccctcacaggcaaaggggtgcgcgagggcatcgagtggatggtgaagtgtgtcgtgcggaatgtgcaccggccgccgcggcagagggacatcacgtagcggcagccgcgctgccgtcgggacggctggtcccctggtgctggaggagtggcctcctgttggctcccatgctgctgatctggggggtgggtttgctttgctttggggttcttctatttactttgttttctcgaagacaaactttcctctatgtctggaaaagcgtaggcatccggaggctttggaggggagtctggcagcccggctggcccaggccctgcagcggcagcctttccacagggcgcagcggcggcctttcgaggccctttctggggggtctgagggagacctggttgggaattggggctccagtgctcaggctggcttgggctgcatgaggacagccctgtgggaccctcgggagaccccgtggctgtctccgccccatcgaggaggaggcccgtcagccatggctgccatctggcttctgccctgtgaccccgtgaccccggaagtggtctggggctgatcttgccttgaggaagacccaggccatgttcccaaaggccagcgggggccctggattgtgatgcagcctcgggacagggctgaggcctgcgggggaagacctataccccacgcctgggcctggcttcacctcaccctaatcccccgggagggagctgactgatgcaaaaagctgagggggcctgctgggagtggctgtttttatgccccagccccgcaagttggggagtgtttgtgggggtccagagccctcccccagccaggagagaacctcccggaggggttctctgtggggccctgtgtcccctgctcgggagtaaggctggtcctggggtcctccctgcacggaccccactgggcctgccgagtgctgtgttcttcctcagtctggctgtgggcaggagcggcctgcccagtgtcacccagggtgagtgcaaaataaagacggcgagtgtgaaaaaaaaaaaaaaaaaa

SEQ ID NO: 290 - DNA, 1883 bp, Homo sapiens
ccgggccggggtgccagcgcccgccttcccgtttcctcccgttccgcagcgcgcccacggcctgtgaccccggcgaccgctccccagtgacgagagagcggggccgggcgctgctccggcctgacctgcgaagggacctcggtccagtcccctgttgcgccgcgcccccgtccgtccgtgcgcgggccagtcaggggccagtgtctcgagcggtcgaggtcgcagacctagaggcgccccacaggccggcccggggcgctgggagcgccggccgcgggccgggtggggatgcctctgcacgtgaagtggccgttccccgcggtgccgccgctcacctggaccctggccagcagcgtcgtcatgggcttggtgggcacctacagctgcttctggaccaagtacatgaaccacctgaccgtgcacaacagggaggtgctgtacgagctcatcgagaagcgaggcccggccacgcccctcatcaccgtgtccaatcaccagtcctgcatggacgaccctcatctctgggggatcctgaaactccgccacatctggaacctgaagttgatgcgttggacccctgcagctgcagacatctgcttcaccaaggagctacactcccacttcttcagcttgggcaagtgtgtgcctgtgtgccgaggagcagaatttttccaagcagagaatgaggggaaaggtgttctagacacaggcaggcacatgccaggtgctggaaaaagaagagagaaaggagatggcgtctaccagaaggggatggacttcattttggagaagctcaaccatggggactgggtgcatatcttcccagaagggaaagtgaacatgagttccgaattcctgcgtttcaagtggggaatcgggcgcctgattgctgagtgtcatctcaaccccatcatcctgcccctgtggcatgtcggaatgaatgacgtccttcctaacagtccgccctacttcccccgctttggacagaaaatcactgtgctgatcgggaagcccttcagtgccctgcctgtactcgagcggctccgggcggagaacaagtcggctgtggagatgcggaaagccctgacggacttcattcaagaggaattccagcatctgaagactcaggcagagcagctccacaaccacctccagcctgggagataggccttgcttgctgccttctggattcttggcccgcacagagctggggctgagggatggactgatgcttttagctcaaacgtggcttttagacagatttgttcatagaccctctcaagtgccctctccgagctggtaggcattccagctcctccgtgcttcctcagttacacaaaggacctcagctgcttctcccacttggccaagcagggaggaagaagcttaggcagggctctctttccttcttgccttcagatgttctctcccaggggctggcttcaggagggagcatagaaggcaggtgagcaaccagttggctaggggagcagggggcccaccagagctgtggagaggggaccctaagactcctcggcctggctcctacccaccgcccttgccgaaccaggagctgctcactacctcctcagggatggccgttggccacgtcttccttctgcctgagcttcccccccaccacaggccctttcctcaggcaaggtctggcctcaggtgggccgcaggcgggaaaagcagcccttggccagaagtcaagcccagccacgtggagcctagagtgagggcctgaggtctggctgcttgcccccatgctggcgccaacaacttctccatcctttctgcctctcaacatcacttgaatcctagggcctgggttttcatgtttttgaaacagaaccataaagcatatgtgttggcttgtt

SEQ ID NO: 291 - DNA, 2532 bp, Homo sapiens
cggcgccgctcgctcccccgacccggactcccccatgtatgacgactcctacgtgcccgggtttgaggactcggaggcgggttcagccgactcctacaccagccgcccatctctggactcagacgtctccctggaggaggaccgggagagtgcccggcgtgaagtagagagccaggctcagcagcagctcgaaagggccaagcacaaacctgtggcatttgcggtgaggaccaatgtcagctactgtggcgtactggatgaggagtgcccagtccagggctctggagtcaactttgaggccaaagattttctgcacattaaagagaagtacagcaatgactggtggatcgggcggctagtgaaagagggcggggacatcgccttcatccccagcccccagcgcctggagagcatccggctcaaacaggagcagaaggccaggagatctgggaacccttccagcctgagtgacattggcaaccgacgctcccctccgccatctctagccaagcagaagcaaaagcaggcggaacatgttcccccatatgacgtggtgccctccatgcggcctgtggtgctggtgggaccctctctgaaaggttatgaggtcacagacatgatgcagaaggctctcttcgacttcctcaaacacagatttgatggcaggatctccatcacccgagtcacagccgacctctccctggcaaagcgatctgtgctcaacaatccgggcaagaggaccatcattgagcgctcctctgcccgctccagcattgcggaagtgcagagtgagatcgagcgcatatttgagctggccaaatccctgcagctagtagtgttggacgctgacaccatcaaccacccagcacagctggccaagacctcgctggcccccatcatcgtctttgtcaaagtgtcctcaccaaaggtactccagcgtctcattcgctcccgggggaagtcacagatgaagcacctgaccgtacagatgatggcatatgataagctggttcagtgcccaccggagtcatttgatgtgattctggatgagaaccagctggaggatgcctgtgagcacctggctgagtacctggaggtttactggcgggccacgcaccacccagcccctggccccggacttctgggtcctcccagtgccatccccggacttcagaaccagcagctgctgggggagcgtggcgaggagcactccccccttgagcgggacagcttgatgccctctgatgaggccagcgagagctcccgccaagcctggacaggatcttcacagcgtagctcccgccacctggaggaggactatgcagatgcctaccaggacctgtaccagcctcaccgccaacacacctcggggctgcctagtgctaacgggcatgacccccaagaccggcttctagcccaggactcagagcacaaccacagtgaccggaactggcagcgcaaccggccttggcccaaggatagctactgacagcctcctgctgccctaccctggcaggcacaggcgcagctggctggggggcccactccaggcagggtggcgttagactggcatcaggctggcactaggctcagcccccaaaaccccctgcccagccccagcttcagggctgcctgtggtcccaaggttctgggagaaacaggggaccccctcacctcctgggcagtgacccctactaggctcccattccaggtactagctgtgtgttctgcacccctggcaccttcctctcctcccacacaggaagctgccccactgggcagtgccctcaggccaggatccccttagcagggtccttcccaccagactcagggaagggatgccccattaaagtgacaaaagggtggggtgtgggcaccatggcatgaggaagaaacaaggtccctgagcaggcacaagtcctgacagtcaagggactgctttggcatccagggcctccagtcacctcactgccatacattagaaatgagacaatcaaagccccccccagggtggcacacccatccgtttgctggggtgtggcagccacatccaagactggagcagcaggctggccacgctcgggccagagagagctcacagctgaagctcttggagggaagggctctcctcaccctgccaggaagcttcttaacatgtgacaggaccagggaccaggagcatggtgaagccaagtggcagatgggagccaacctggatgggggtttggggaaggagggcatgtgtagcagagaacttaggggggcctccttgcctttctcattcttttgccctgcatcctgtcatttctgttcttgtccctcatacatctttggagaaccgggctccagactttgttccctgactcatagctgccgcttgttaggttagggttagatggggagagacagggcacagaggacctgtctccccggctactcttgccttatggctctagtgtgtgacctacagagcatgctccacaagcccctgcctcacctcactgtcatcactaataaacatcatgcacagtc

SEQ ID NO: 292 - DNA, 65608 bp, Homo sapiens
  misc_feature: n=a,t,g or c
ccgcccccagccccagccccgccgggccccgccccccgtcgagtgcatgaggttgacgctactttgttgcacctggagggaagaacgtatgggagaggaaggtgcgcgggccgcggggtgtggggcgagggcctggagggggtgcccgggcagcgtggggcacgggagggggccgggtctgccaggaggccgcgccctgcctcctccgggatgagctcgtccttacgaagcccgcaggcccctccctgtccccctcccgcccgggatccccctccccggcccccggcgagctgccctcctgcgggtctgggggcccctggaccctttttcctcctcccacgtccccccgcgaaggactcccagacactgcccaccccgcgtcggcctccatccgcgtgctctgtccaccacccgggcctcgctggggccaccctttatccagtctcggaagaaagagcggctggggacacagccccgggtcccagtggccgcctgcccggctctgtgaccttgagccaggcgctgacttcctggtcctcagtttccccttctgtacatttggaaactgggtagttgcccccccggtgtcggtgattgggggccagatgggtagagcggagataggcgtccaggaagccggaggccgtgtactgcgggagcctcatccactctccctgtccgtgccccaaacccggtgcctgccctcagtcttggctgggagcatgactcatcctaacctcctctttagccccttctccctcactggggcccaaggcgcagtactgcactgcagttagggttcaaggactcccccagcctaggacagggtctgggggcccctccttggatctccttcgctgacctgtcacttagatccacctggccccaaggcagggcctgactccacacctccccctgccaccaactcttcccaggcccatgaaaacctgattggggtaggggcccaccttcctgtagcccctgcctacctaaggtacctgcgtcttcacagagggtcaggctgttgtggccttgggacctagctatgtgactgggcaagccatgccatctctggggctcagtctccccttctgtacagtggagaggggcaggtctggggcattttccagggcccaccagctccaagggtgccaggccccaaggatgactaagcatcgtgtggctggctagaggaggtgccaggcctccctgggacaggtgtctgggagtacccacgtctgcagccccttccccttgccaagccagggcattcattgccaaggatctgttagggccggcacctccaggcttcctgcccttgacctcccagctggcttcagcccaggatgcactaatccagccctgtccagtccctgcctttgaagggccctcttagtacttcttcctgggcaggagagggaagaaaggaggctgtgataggaatgtcacccactgccttatccctaaagccactgcttcctttctcctcatttaccttgccagatccaatgctatagcgggaggatggacctgatcctcctcctaagctgatacatagggaaacagggccagagaagcttggcaacctagtcagtatctcagcaagactcaggccagcgccctttcttctcctatttggcacagcgactgccctgcctgggcgctgcacatgtgcagtgtgcgaggattggtgcaggtgtaggtatatgtggggtgggcagggcaagctgggcctgcaccagatcacacttcctgagaatgcttcccaactcccttcccaccctgcaggaagcgagttgcccgtgtgtgcaagctgcggccagaggatctatgatggccagtacctccaggccctgaacgcggactggcacgcagactgcttcaggtagggtggggtgcccagggcctgtgttgccctaaacaaggcctgccagagaggacaggctggtcaaggaatgggggaggccgggatatgcctcctggtgccgtcccctattgtgacttcgtggccttaatttaccatttatgacatgaggtgttttgactagaaaatccctacaggccttcctgttgtcattttatttatctatttttttttctttttgagacggagtctcgctctgtcacccaggctggagtacagtggtgcgatcttggctcattgcaacctcttcctcctgggctcacgcagttctcctgtgtcagcctctggagtagctgggattacaggcgtgcaccaccacgcccagctaatttttgtatttttagtagagacgggttttgccatgttagccaggctggtctgaaacttctgacctcaagtgatcttcccacctcagcctcccaaagtgctgggatgacagacataaaccaccgctcctggcctcattttattttcttttatgtatttttcttttttcgaaatggtcttgctctgttgcccaggctggagtgcagtggtgccatctcggctcattgcaacctccatctcccgggctaaagtgatcctcctacttcagcctcccgagtagctgggattataggtatacaccacaatgctcagctaattttttaaattttgtgtaaagacagggtctcactattgagacccaggctggtcttgaacttgtgacctcaagcaatcctcctgccttggcctccgaaagtgctaggcttacaggcgtgagctaacgccttggcctctgttgtcatcctagatctctgagatctaaatcttagagaggatgggagagacctccaattgagccagtgcctgcaattcagccccctgctggcacccagacagggggaagagttggaaggaatgtccctcctgccttctgggtgttcatgctcttgcagggagggaagacaaaccaggccttaagggaaaccaggccaccctcagtgtcttcccaggctgcttgcgaacatgcataacccagtcacaccagccccagtgtccagacacacacccacaggtaggaagaaagtagggtcagggttgtggcggaggataaagagtacatgaggacctgaaggtcacccagtaggaccatcctgagaagccaggagcaggggtctacctgccttgagccagagcagggccagagcaggggtctcaaaggatgtgagatttcctgggtagaaaagtagagtggaggtggggcgtggtggctcacacctataatcccatcactttttggggctgaggtgggcagatcacttgagttcaggagttcgagacaagcctgggcaatatggcaacaccctgtctccactgaaaatacaaaaaattagccgggcgtggtgcgcatgcctgtagtcccagctactcaagaggctgaggtggcagggttacttgagcctgggaggtggaggctgcagtgagctatgatcgcaccactgcactctagcctgggcaatagagcgagacccagtctcaatttttaaaaaagaaagaaagaaaaacaaatggtgtgggagagaattacaggcatagtcaccaaacagcaaggttcaggggagaaaactccataaaagggtagaaggtgaagcttctgggatgcccagcaggggtcaagacatccaccactaggactttattttaggcttctgccttggtttattttttggtttttggtttttttgagacagtcttgttgtgtcgcccaggctggggagcagtggcgcgatccctcctcactgcaacctccgcctcccaggttcaagcgattctcctgcttcagcctcccaagtagctgggattacaggtgtgcaccaccacgcccggctaagttttgtattttcagtagagatagggttttgccatgttggccaggctggtctcgaactcctgacctcaagtgatctgcccgcctcagcctcccaaaatgctggaattacaggcatgagccactgcacctggcctcggtttgtttttttgtttcttcttttctttttttttacacagggtcttgctgtgtcacccaggctggcgtgcagtggtgagatcatagcccactgtagcctccagctccaactggttcaagcgatccttctgactcagcctcccaaagtgctgggattacaagcataagccaccatgcccagcctgttttttcttttttaggaataacgtctaacgttttctaacattcagtaagggacaacccctgttctaagtactttgcatagttagatattagtgctgtctttgttttgccagagagaaaattgggacacagagaggttaattctcttgatgaaagtcacacagccagtgagtgaaatgaacacactcagtgtggctgaaaggagacagacagcatgccctgggattctgcatcaggtgctcagaaagaggccttcggggggcaagagggctctcaacaggcagaggaaaccatctgcacagcggtgggatggtgcggactgctgagggaacaggaacagttcccttggaaggaacagaataagctgagggatccaacaagaaacaaagttgagaccgattcgtgaagggccttgaatgccaagataaggagtttcagaagtcaggatgggggtggtggctcatccccgtaatcccagcactttgggaggccgaggcaggcagatcacttgaccccaggagcttgagaccagcctggccaacgtggtgaaacccccgtctctactaaatattcaaaaattagccaggcatggtggcacatgactgtaatccaagctactcgggaggctaaggaaggagaatcacttgaacctgggaggcggaggctgcagtgagctgagatcacgtcactgcactccagcctgggagacagagcgagactccatctcaaaaaaaaaaaaaaaaaaaaatagaagggagtcggcagaaagccagggaggggctggggtgacatgctgttgaagaatgccatcccagtgggccggtggtggtatctaggcagggaagggactgtcccagtaactcaagggtctgagctcataggacctgacctgggacagtgactgaggatggagagaatttcaggcagaagggacagtttttggtgagtatttgtcatattggctaccatgcattgagcactcttcatgctaatttgttaaatcttcatcataactctatgagggactgtatgtgcccagtttgcatgggagaaacagagattccatgcaatcaagtgcctcgctgaaggttgtaacatctagagctgggactaaaaccttctcactccacatcgccacagagtaggaaaggcaggggctggcggtggcacatgcctataatcccagccctttgggaggcggaggcaggtggatctcttgagcccaggagtttgagaccagtgtgggcaacatagtgaaaccttgtctctacaaaaaaattagctgagcatggtggtggtgcctgtagtcccagctactcaagggcgctgacatgggagggttgcttgagcctgggaggtggaggttgcagtgagctatgatcacaccactgcaagccagcctgggtgacagagtgaaatcccatctcaaaaaaaagaaagaaaggaagaaagaaaaaggcaggggcttcggggagggcatgggcactggcgaatggcagggtggaacctgaagccatctggttttctaacctgggcactggggagttggtggtttgttgactctgatggaattgggggtcatgttggggaggagacatgctcatctgtgttgagctggaggggacatgggctatccatggtggctgtgtcctgcccagagctagccatgggagcctgagtccagttggaggtaggaaagtcagaaaaaacggccgcctcggagctggccctgagatggtgagtgggatttgtgatagggccaagacgaatgaagggaagaactttggggacccctgtgtctgcggtgaggggggagatggagccttgggtgatggagagagggtcaggagtagagccacagaagccacaggagggaagccgtgttacaggatgggtgtacctggctttggagtggcctgtcccaaatcactcaccaggagaggggtgagtccccgggtcagggcagtaaagaggaggcatgtttgtgctgtccctggtgtagtgaaactcaagaaggaagccaggtgcagtggctcacgcctgtaatcccagcactttgggaggccaaggcaggcagatcacctgaggtcgggagtttgagaccagtctggccaacatggtgaaaccccatctctactaaaaatacaaaaattagccgggcctgttggtgggcgcctgtaatcccagctactcaggaggctgaggcagaagaatcgcttgaacccgggaggcagtgattgcagtgagtcaagaatcgcgccactgcactctagcctgggtgacagagcaagactccatctcgaaaaaaaaaaagtctcaatatggggaaagatccactagaagtaagagccatggcttctacctcgtggcttgtgggtgtgatactcccaacagtccccaaagctggtggtcctcaccgcgtgacagtgagcagagcagctcagagggggtcactgctcacctgggtgcatggctgaccacagccaggctggctctcagtgggatgcccaaggtgctagactctgcttagtctccctcgggccctgggcttgaggcattgggcccggcccagacctcatttcatgcactgagacctttgttccagggcccctcacccctctgaaggtgttcgggcaggggcaatgtgataaggccatgaggggtctgcagcctccagccccactggggaggtggccagtgatttccaccttcctggcccctctgcatgcccctcccagtggaacttcctagggtccctgagtcagtcacttgcaaataattatggcgtgcccactctgcattaggcccctctcacaacaacccagtaagggggtgctatttatttattaaagcgattttttttttgagtctcgctctgtcgcccaggctggagtgcggtggcgcaatctcggcttactgcaagctctgcctcccgggttcacaccattctcctgcctcagcctcccaagtagctgggactacaggcgcccaccaccacacccggctaatttttttttgtttgtttgtatttttagtacagacgaggtttcgctgtgtgagccaggatggtctcgatctcctgacctcgtgatccgcccacctcagcctcccaaagtgctgggattacaggcgtgagccaccgtgcccggcaatattaaagcgattttaaggccaaggctggtaactcacgcctgtaatcccagcactttgggaggctgaggcaggaggactgcttgaggccaggagtttgagatcaacctaggcaacatagtgagactccatctctacaaaaaaattagccaggcgtggtggtgcgtacctgtagtcccagctactcaggaggctgagatgggaggatcatttgaacccaggatgtcgaagctgcagtgagctgtgatcacgccactgcactctggcctgggcaacagagcgagacactgtctcaaatttttaaaaagcgattttacaaatgaggtgcagagttcagtcacttgccaaaagtctcacagcgcgtgaggagtagaatcaggactcgaaccgaggcagcctggcttcagagcctacagtgtaaccacagcttagtcccacacctcccagaccaacagggtccctgccttctagtgggcaagacactcagtgaacaaatgtagtgtcaggtattgggggacagcactctcaggaagtgatgtttaagggacagaattgaagggagcagtgtttagaggatgtcgggggtagggccggtgcatgtgcaaaggccttggggtgggaatgtgcttggcacaactgaggaccacaaagccagcgtgcgggagtgcagtcagtggccaggggtgcatagagccttgtgggccccgtggaaggtgccgttggctgtacactttttttttttttttttttttttttttttgagacagagtctcgcttttgttgcccaggctggagtgcagtggcgtgatctcagctcactgcaacctccgcctcccgggttcaagcgattctcctgcctcagcttcctggtagctgggactacaggcgcccaccaccacacctggctaatttttgtgtttttaatagagacggggtttcaccatgttagccaggctggcctcaaactcctgacctcaagcgatctgtctacctcagcctcccaaagtgctggggttacaggcatgagccactgcgcacaggcagctgtgcatctttgaatgtcataacctgagcatctgagagctgctcctgtcccctggcccctgctcttgaggaagtcccacgctgataggacagacagggtcataagtgctgtgatgggggcctgcaggctgctggagggctcagccgggaccagatgctgcccctctttgtagagtgggacaattgctgcaggcccatgggacctctggtattagccctgagggttgtcactccggggcctgcccctttctgtgttctgacctcccagccccttgcaggccccgcctcccggaaggttatgaccaggcttggactggtccaggcttccctttggctcacatactgcctctgcgaggtcccctccaggaagcctcctgtgcacaacccccagggctgccgcatccctggtagcatctccttggcagctgggtgggctggccctgggcaaggagggctgagcatgctgctggcctgtggggttggagcagcggcgggatgcaacctccctttcttcaggggacctttttggcgaagacaaactgtccataggaagtcgacctctgttcccttgggggcagcagtggaagaggcagctgcttttgagcttgtccctgtccccagagaagcctgaggccttcagtgccgttgccagggccgaggctgaggagcctacagcgtgtgttcaggactgagggccagggacgggcacaggctccctgcctggggtccaagcctagatcgctcgctccccacccgcaccaaagcccaggcaaagggtgcttcagccacttcctgttgcaggctcagaccaagtcccctggcacccacgcggctgcagctcctcctgtgcgctgcagccacgctggccccaccctctgcagcctccaatcctgagcccctgagggaggatggggaagcagctggtctggccacccctgccctcccttagacctccagagcccccagtgtagccacagaggatgctgttggcttcagccccaagaagacgccgcttcctccagagggctaagtaagtgggaatccccctccctacttgtcctgggctccaggcagggcccctggtgtaaggcctgggctggaagccgacccacctaggtccaggctctggggcagaactgaaactccttggttactgtcggctgcagctgggagcaggccactccaaagctgtgggtccttccaggacagtctccccatgaggccggtcctccacctgctgtttcttcacacctggtggccagggatgtggccctgggtagaacgatgattctccactcctgtcattatggaagccaccgctgtctcccagcccagccagccacctgggctgcagagcacccctttcatgccctccgggtgcctcccccttctcctgccccagcctggctttgtcctaccctgctctcagggaggggtaccctggagtggggccagggcatggctctcccccgagggagttcctctctggctgtccccagggcagctctgcacagcctcagtacctggcgcacctcccttgacatccttcttagggacagtcaggcactctgtgtggggcactcaagagagccaggcccgtcagcctctagctcctgccagaatgcaggcctgaggggtgaggggcggggcaggggcaggggcagggacaggaactccggcttgctctccatccgcaaaggttcactgaggccccgagccccagccactgagccaccaagtcagcctgggccaggcctgggtgccctgtctgcaatggaggcagagacggggtctcggggcagttctgaggatgctgggtgcacagcgggggcctcgccggcaggaatcacttatgctctctcctgggccaagctttgtggatgcccagcctggggccgcggggagctggcaggtcagtggcagacactggtgggcagacctagtgtctggtagaacaggcatcaaggaagtggtgaccggagggaagccaagtgcactcaaaccctcgggtgagtcatcaccgccgggtctttcacagctgctgaaagtgagcaacagtgatgaaggtttgtgagtttctgcgtgagcgagtgaatggaccagtagcagtttccaggttgtggaagagcgttccctccccgggatggggacacttggttacagcaattcctaatcccccacccacccaccgcccactgcagaggtatgcgggggccctgcttcctgcaggcaggagtgaggggcactcctgtgatgtggcacccctgtgaccgaggtcatgtgtgatcggtgtaagggcaggaagcgagtcattggtctgcaccaggcgtgggggcttctgcgagggcaggacccaaagtcggcctggcctcccggctgcagcactcctttccctttcgaattaggttagagccctgggacgggaggtgccctgtagaccacccccctcaccaacttccgtcctccgccccacccccgcggtgatccggtgaactgccggccccctgctgtgcaccgagtggggcagtgaccctgacgtggcgtctcctgccgcccctgccaccgccaccacctccggtggcccagcctccgcattccccacccccatggaggaatgcaccaggcctcccttcctggatgcacccctcacccacatgcttccaaaccctggcattttctgctccccctttactcccaccccttcccctaggctcccagacaaaggggaactggctggatcctcttaaagggacagtgtcccaccagcttactgctgaactcccctcctcaaccccagttccctagttacagttaattagcattagcagacagcccatgagtgatacccatgcaggccccaggctgtggagagtttcctgggtaggaaacagcccttaaggtccctcatctcatccaggtcccagtctttcctacctgcctctctcctagattgtggccctttggagcctggttcttctgtccctgtgtgaccgacacatagcacccaaacagtggcagagcgggacggaccccctagcctgttctctgtgtgggtctgtaccctgacccagacatgcccccccacagcaggacccaggggggcacatgtgtgcctgcgggttcactggggcacccgcatttggtttattttattttttagagagagggtcttgctgtgtcacccagctggagtgcagtggtgtaatcatagcacactgcagccttcaactcctgggctcaagcgatcctccctccccagcctccctagtagctgggagtacaggacccactgtatcctggctaattttttaataattttttaagagatggggtcttactgtgttgcccaggctggcctcaaacctctggcctcaagtgaacctcccaccttcgcctcctgaagtgctgagattacagcatgagccaccatgcccatcccagactgacatttctatatttgttcatcctggctgggcagggctgctggtccccacccaccgggatgcttggctgggaaaaagccgggaatgtaggtctaaccctggcctgtgttgtggcacctacagcctggcattcctccccatctgcccttcaaggccccaccaaccaggcctccttggtagcctctagtgaggaaacaggcgaaccgtggctttgatgaccctgcacacctggggattctcctctatttttctttttcttttttttttttttggagacagagtctcactctgtcgccaggctggagtgcagtggcacaattttggctcactgcaacctctgcctcccaggttcaagcgattcttctgcctcagcctcccgagtagctgggattacaggtgcccaccaccatgcctggctagtttttgtatttttagtggagactgggttttgccatgttggccaggctggtctcagactcctgaccccaagtgatctgcccacctcggcctcccaaagtgctgggattacaggtgtgagccaccgctttgggaggccgaggtgggcggatcacgaggtcaagagctcaagaccatcctggccaagatggtgaaaccccatctctactaaaaatacaaaaaattagctgggcatggtggtgtgtgcctgtagtcccagctactcaggaggctgaggcaggaggatcacttgaacctggaaggcagaggttgcagtgagccgagatcgagccactgcactgcagcctggcgacagagcaagactccgtctcaaaaaacaaacaaaaagaaaacttgttctaattcttacaaaggtgcctgtagccgaggcagcggcccaggtgaggtggaggagggcgggagtggacgtctcagcccggcccctctcctgcaggtgttgtgactgcagtgcctccctgtcgcaccagtactatgagaaggatgggcagctcttctgcaagaaggactactgggcccgctatggcgagtcctgccatgggtgctctgagcaaatcaccaagggactggttatggtgagcgccccctgccttgcacactcacctggggtgggggtatccaagcagaccccatgctccaggtctctctcccatcattgtctctcctggtctcctttttgctggtctttggagctgctttctgagcctgactgtctgtctgtatccctcagcgcccccatctatggagccagctctgtccaggagctcagcagctggccagccgggtccctgcagttgtttttttggtgacacccttggaagaggcctaggggaggatctgtgggggttgttgggtctgctgagctgggctgttccctcctcacccccgcaccaggtggctggggagctgaagtaccaccccgagtgtttcatctgcctcacgtgtgggacctttatcggtgacggggacacctacacgctggtggagcactccaagctgtactggtgagtgccttggcccctccctgagcctaggaggcccacctgtgtcacagatctgcaagggtgctgactctcccacacccgggcctcctgccctttcccatggggtgaggtttgttggggcaaatgttcatatctcctttcccatcccggcatggaaacaagtgagaaataacacacagaagtcagtgtgaaaaagcctcagacggccaggcatgctggctcacgcctgtaaacccagcactttgggattccgaggtgggtggatcccttgaggctaggagttcaagaccagcctggccaacatggtggaaccccatctctattaaaaatacaaaaattaaccaggtgtggtggcgggtgcctgtaatcccagctactcaggaggctgaggcaggagactctcttgaacctgggaggtggaagttgcagtgagccaagattgcaccactgccctccagcctaggcaacagagcaagactctgtctcaaaacagaaaacctcagacgtcagctttcttactggccatgactgcagcatggtgctggcacaaaccaccagaggtggggtggatgccacaagttaaggacaccatccccagcataactgctccctctttagacaccagccacaagttcaggggtccccaacccactcacacttctgaccgactggctacaaattcagggactcccaagaccctgccaagtttgatcgtttgctaacagactcacagaactcaggaaatcctccatttttatcccagttttattatgaaggacacagctcaggtccgaccaaatgaagaagcatctcccctccctcccctagcacatcaatgtgatcaccaaccaggaagcttcactgagcttcagcagccagagtttttattgggatttcattacatcgtcatgactgattgagtcattggccgtatgatcaagcttagtctctagcccccgttcttggaggtcaggctggatgaaagctgcaaccctcttcaaatcacatgatgtatctttgcggggctgagtcatctcattagtatcaactcaggaatagtctgaggggctcatgaataacaaagataccccattccaaggacttagagtctccctcccaggaatcaggacaaaacccagacagattctttcttatacaacactgatcaagctggattagaggacaacgtggcttgatcccagatgggcttttaatgacttcctcctgaactggatttatcctcaggccttgtcctggccgccttacaggatcacagcgagtagacagacccgaatgactcagagggacgagggctggctgggcacgcacagttcctgctcccagttccataggaagagtgaaagaaaagaaagctggccaggtgcagtggctcacccctataatcccagcactttgggaggccaaggcaggcagatcacctgaggtctggagtttgaggccagcctggccaacatggtgaaaccgtctctactaaaaataagaaattagccaggcatggtggtgcttgcccgtaatcccagctactcaggaggctgaggcaggagaatcgcttgaacccaggaggcggaggttacagtgagccaagatcacaccactgcacttttggacaattgctagctttccttttcttttgagacagagtcttgctttgtcacccaggctggggtgcagtgttgtaatcaacagagtgagactccatctcaaaaaaaaaaaaaaaaaggaagggattgggggaagagcctggggctgggggctgcagagatgctgaaattgatgacgcccttgacactcttttcttcccaccccggcggctcttgcagcgggcactgctactaccagactgtggtgacccccgtcatcgagcagatcctgcctgactcccctggctcccacctgccccacaccgtcaccctggtgtccatcccagcctcatctcatggcaagcgtggactttcagtctccattgaccccccgcacggcccaccgggctgtggcaccgagcactcacacaccgtccgcgtccaggggtgagtggccggcctgccgaggctgccgtcggtgtggctatggctgttgatgtgggtggcagagtctggcactgggggccctgaaaatgaatgggcgagtgtttgggtacagatggggcccagttctgacaacctggtttgccagatttctggcccagtcattcctctgaataccattacaaatgccagatacaataaaaagacattttcaaccgggcatggtggcccacacctgtaatctcagcacttcgggaggccgaagtgggtggatcacctgaggtcaggagttcgagaccagcctgggcaatgtggtgaaaccccgtctctactaaaaatacaaacgtagccaggcatggtagtgtgtgcctatagtgccagctgcttgggaggctgaggcaggagaatcacttgaacccaggaggtggaggtttcagtgagccccgactgccattgcactccaggctgggcaacaagagtgtaactctgtatcaaaaaaataaaaataaaaaaaacacactcaaaaaataaaaagacattttctttagtccatgtctgatccaacaagaaagaggaggaaccaagtcaagaatgagtgaagaagctgggcgcagtaactcacacctgtaatctcagcactttgggaggccaaagtgagaggatcacttaaggccagaagtttgagaccagcttgggcaacatagcgagacctgcatgtctacaaaaaaaaaaaaaaaaattaaaaattagccaggcatggtgaaatcactgaacacataaaggctgggcatggttgctcacacttataatcgaaacactttgggaggctgagatgggaggatcacttgaggccaggagttcgaaaccagcctgggaaacattgtagtcacagctacttgggaggctgaggcagaaggatctcttgagcccaggaagtggctacagtgagctataattgcacgactgcactctaggctgggcaatggagcaaaaccctgtctcaaaaaaatggggcagggctgataaagattagattactgtgtgactttgagcagctgctttctctctaggctttgggggtctgtttgaacaatgagggagttggataccttggagctttctaagatttctgtggcgcctttattgacaccttgagaagtagcatgcagtgtttctacttttgggcaattggtcacttctttttttttgagacagtctcactctgtcgcccagtctggggtgcagtggtgtgataccagctcactgcaacctccacccacaaggttcaagcaattcttgcacctcagccccctgagtagctgggactacaggtgaccacatgtggctaatttttgtatttttagtaaagacagggtttcaccatgttggccaggctcgtttcaaactcctgggctcaagtgatcctcccttctcggcctcccaaagtgccgggattacaggtgtgagccaccgtgcccggcccaagtgctagctttctctctctctttttttttttttcgagacggagtctcgctctgtcgcccaggctggagtgcagtggtgtggtctcggctcactgcaagccccgcctcctgggttcacgccattctcctgcctcagcctcccgagtagctgggactacaggcacctgccaccatgcccggctaattttttttttatatttagtagagacagggtttcaccatattaggcaggatggtctcgatctcctgacctcgtgatccgcccgtctcggcctcccaaagtgctgcgattacgggcatgagccaccacgcccggccctaccaagtgctagctttcatttgacgcagtgaatgtttcttgtacacctggcaggtgcctggcactgcataggcactgttgagatgtgaaggtggccctggggacagaaaattatactgggcttgactgtgtgtctccatcccttgacatcagccaagccagcagctgctttacatacatgatgagcagacagctgcttgaaagagatgaggaaactcccagaccaacggctcttaccagagggccaagggaggtccccacagagtcagaggctgcagctggtccctgaaatccaggcagaattttagaaatgaagacagtcagctgggtgcagcggctcatgcctgttatctcagccacttcggagggctgaggtgagaggattgcttgagcccaggaggtggaggctgcagcaagctatgatgacaccatgcattccagcttgggcgacagagcgagaccctatctctaaaataaaaatgaagaagacagttaatgacgtctcctccctgtctgcctcactgggtaagcattcgcccagccaacatctggaacatcccagttctgcaaagagccacacccttcccagaaagagcccaacttgccaaagatttacttatttgttttaaactggttttagttgaccgcttttcattttgtgtatagcagcgttttaaggaaggtctaatttatccaggccacctgctgctttagcaaaccaagggagaggatgtgagattctaaggaatttacatatgtatgtcatatatatatatatatatagacacacaatttttttttgagacagggtcttgctctgtcatacaggctggagtgcagtggccaatcatagctcactatagcctcagatgcctgtgctcaagcaatccactcacctcggcctcctgagtagtgagactacaggcacacaccaccacacccagctaattttttaattttttgtagagactgagtcttgctgtgtcgcccaggctagtcttgaactcctgggctcaagcaatcctcccacattggcttcccaaagtgctaggattacaagcgtgagccactatgcctggcttatttttaaggttatatgcatgcaaagcctgtatcaatgaaaatattttctttggtttttttcaacttttcatcttcgcattttgcagatttatagaaaatttgctaaaataataagtccattgaatacatacacacccttcaccaaggttcaccaattcgtaactgccatatttgggagttatatgtgtgtctctctatatatacatatatggatacagatacatatacatgtttagtgacttgtttatatttgtacatacatgtacatgttgttatttattgatcgtttgggagtaagttgcagggatcattgactcccccacaattatgctagatattctcaaaagaaggaccttctcttttttttttttttttttttttttttggagacagggtatcactgtcattgaggctggagtgcagtgatgcgatcacagctcactgcagcctcaacctcccaggctcaagtgatcctcccacctctgcctcccaagtagctgggactacaggcacgggccaccacgcctggctaggcattctgttatgtaattatccaattgtatcttatagttcagtgatcacattttggaaatgtaacattgataccattatctaatacacagaccatattcaaattttgcctattgtctctatactgaactactgaactgtcctttatagcaatctccccctcatccacagtccagtccatgatcaacattgcatttaatcgtcatgtgtcatcagtatcttttttttttttttttttgagacggaattttgctcttgttgcccaggttggagcgcaatggcgcaatcttggcttattgcaacctccgcctttgggcttaagtgattctcctgcctcagcctcctaagtagctgagattacaggcgtgcaccattatgcatgcctaatttttgtatttttattagagacggggttttaccatgttgccctggctggtcttgaactcctgacctcaaatgatccacccacctcagcctcccaaaatgctgggtttacaggcatgagccactgcgtctggccatttcctcagcctttcattgcccttcatgatcttgacatttttgaagtgtacaggccagtcattaaagtaaaatgtttttccttttttttttttttttttttaaaaagagacagggtctcactgtgttgcccaggctggtctcagactcctaggctcaagtgatcctcccgcctcagcttcccaaagtgctgggattacaggcgtgagccatcgtacctgccctcgcatttgggtttgactgatgtttcctcttagggagacaggctctgcaggtttggcctgatactgcataagtgatcctctgtccttccgagtggatcttgccaggagacatatgatgtcagtgtgcccttggctgaggatgttcactttgattacttgttttttctgtactgtaaggatttttttccctttgtcatcaataaaccatttgtgagatttgagtctgtaaatatcctgttcccaaaaacccttccccaaatgatttgagcatctattgatgattcttgcctgtagcgattattactagggtggctaccaaatgctgaatttctaactctgttcttccttctgcatttgttactgtaaggaagagcttctcccccatacgagaatagtctttttgtttgcttggttgtttttttgagatagggtctcactctgttgcccaggctggagtgcagtgacatgatcatagctcactgcagcctcgacctcatgggctcaagcgatcctcctgcctcagcctctcgagtagctgggactacaggcagcaccaccatgcctggctaattttttattttttgtaatggtgaggtctcactattttgctcaggctggtctcgaactcctgacctcaagtgatcttcccacctcagcctcccaaatagctgggattacaggagtgtgccaccatgctcagctaattttctgtaaaaaatgtcatagagatggggtcttgctatgctgcccaggctggtctcaaacccctagtctcaagcaatcctcccaccttggcctcccaaagtgctgggattccaggcatgagccaccacacctggccctgtttttcttaaagttctcagtctcctctctgccttacccccatccccttttccatctccaggacctagggcagagacaaagtgagcattccctaaaaagcttttatgaggcaaaatgaaaaccagctcacgcctataatcccagcactttgggaggccaaggtgggtggattacctgaggtcaggagttcaagaccagcctgaccaacatagagaaaccccatctgtactaaaaatacaaaattagccaggcatggtggcacatgcctgtaatcccagctactcaggagcctgaggcaagagaatcacttgaacctgggaggcggaagttgcaatgagccgagatcactccattgcactccagcctgggcaacaagagcaaaactctgtctcaaaaaaaaaaaagaaaagaaaagaaaaccaggtccctaacaccgaagagttaaaagaaataagtaaatttggcaaattggtctttttgtgagttagcttataggcaactgatcgagggtctctttcccgtcttcaccctgcaattgtggctcagggcaagctgccagctccctcctgccaatgcaggagcaatagagcttggcctcctcttgcagggcgagtttgggagtcagatatgaagccactaatccgggacctttttgggacccaaggcactcatctgccccaagcataccaggcaggccaggtgcaatgactcatgtctgtaatcctagcactttgtttttgcgacggagtctcgctctgtccacccaggctggagtgcagtggcagaatcttgactcactgcaacctccacctcccaggttcaagcaattcctgcctcagcctcccaagtagctaggactacaggcgcccactgccacgctcggctaatttttgtattttcagtagagacggcgtttcaccatgttggccaggctggtctcaaactcctgacttcaagtaatccatccaccttggcctccccaactgttgggattacaggtgtgagccactgcgcccggccagtcctagccctttgggaggctaaggcgggcggattgcatgagctcaggagttcgagaccagcctgggaaatgtggtgtaaccccgtctctactaaaaatacaaaaaaaattagctgggtgtggtggtgtgcacctgtaatcccagctactcaggaggctgaggtacgagaatcgcttgaactcaggaggcagaggctgcagtgagctgagattgtgccattgcactccagcctgggtaacagagtgagattctgtctccaaaaaaaaaaaaaaaaaaaattcgagaccaaacatacctgggatttggaaggatagatctgttcccccagggtggagacaatggtccattgaatgggaacagctgagcatcttgtgtgggtggccagtgcctacaagcgtgccacctttctccagctcacacctgtggcagacatcagtaattgattacagaattcctcccctgaaaccagaactcggtgttctggccatctgctacttcccagtcacacgaagtagaatcctccacctgctcaccctggatctggtgcccttcgccttggtttcctgttggggctctgagggacaggtgggcactggcctgacccctgccttacccacagagtggatccgggctgcatgagcccagatgtgaagaattccatccacgtcggagaccggatcttggaaatcaatggcacgcccatccgaaatgtgcccctggacgaggtacggtcctgagtctgtggggcaggacgggaggtagtgccttcatgcctagccccctccccactccacccccattcacatgcctgctgtccccagattgacctgctgattcaggaaaccagccgcctgctccagctgaccctcgagcatgaccctcacgatacactgggccacgggctggggcctgagaccagccccctgagctctccggcttatactcccagcggggaggcgggcagctctgcccggcagaaacctgtcttgtaagtcagcctgctcctcggttcagctgggtgctttcactcctgctggggctcaggggctgtgggacctaggtcggggagccagccctgcacaaatgcagcccaggcttgagccagggaggtggaggctgcagtaagctgtcatcacaccactgctctccagcttgggtgacaaaacaagacccactctcaaaaaaaaagaggaaacacacattttttaaaaagccggggacggggccaggcgtggtggctcatgcctgtaatcccagcactttgggaggccgaggcaggtggatcacctgaggtcaggagttcaagaccagcctggccaacatgggaaacctcatctttactgaaaatacaaaaattagccgggcttggtggcaggtgcctgtagtcccagctactcaggaggctgaggcagatgaatcacttgaacccaggagatggaggttgcagtgagccaaggtcacgccactatactccagcctgggcaacagtgtgagactctgtctcaaaaaaaaagaggatgacagagcaggatctgaggggttgaggggagctgggggctgccactagagccaggataggccgagacactgggatgggcagcctttggactgtcccaggcgggccctcccaaagcagggggtgattgcatagactggcatggacaggggcatgcaggcaggaggaggaaggggcagggccttggccgggtgctacctgtcccccggtggcacttggcaccatgtgtgccccccaggaggagctgcagcatcgacaggtctccgggcgctggctcactgggctccccggcctcccagcgcaaggacctgggtcgctctgagtccctccgcgtagtctgccggccacaccgcatcttccggccgtcggacctcatccacggggaggtgctgggcaagggctgcttcggccaggctatcaaggtacagagcatgccagggtctcaggggacagtctgggtgggacccctccatcctccttccttcccagtctatggaaacacagtggaaggggtatctggcttccagactccctggccagtgccctctcctcccttggcctcctggagctaattaggaacaggggacctcctacaggtagactgagaccttatgtgcgggaggtcattgaaaggtggctcctagccaggcacagtagtttatccctgtaatcccagcaccatgagaggctaaggctgtaggatcgcttgagcccaggaattcaagaccagccttgacatcatctctacaaaaaatttaaaaattaattgggtatagtggtgcatgcctgtggtcccagctacttgggaggcttaggcaggaggattgtgagccaggagttcaaggctgcagtgagctatgatcatgccacagcactccagcctgggcaatagagcaagaccccatctcaaaaaaaaaaaaaaaagacaagggattaatacatcccatccacttgggtatttgggaacatcccatgcacagcctagagtatgaagccatctgcacatctccctggcagtcctggggtggagatggggcttcctagaaggcgggcttacagcagagcttctgtcttcacacctctgtgtcccacacgcaggtgacacaccgtgagacaggtgaggtgatggtgatgaaggagctgatccggttcgacgaggagacccagaggacgttcctcaaggaggtcagtgagcggaatgccctcttccctccagagggacttccaggtgctcacccctgccccatcaacacaggtcggaaaagggctctgggaaccattgaaagaagagcgagcaggccaggcatagtggctcacgcctgtaatcccaacactttgggaggttaaggagagaggatactttgagaccaacctgggcaacatagcaagaccccgtctctacaaaaaaattttaaattaaccgagcttggcaatgtgcacctgtcatcccagctactcggggggctgaggtgggaggctcgcttgagcccaggagttggaggctgcaatgagccatgatcgcaccactgcactccagcctggggaacaaggcaagaccctgtgtccaaaaaaaataaaagtaactgcattggtcgggcatagtggctcacgcctgtaatcccagcactttgggaggctgagccgggcggatcacctgaggtcaggagttcgagactaccctggccaacatggcaaaaccccgtctctactaaaaatacaaaaattagcccagcatgatggtggtgagtgcctgtcatccaggctactcaggaggctgaggcaggagaatttcttgaactcaggaggcggaggttgcagtgagccaagatcgtgccgctgccctccagcctgggcgacagagtgagactccttctcaaaaaaaaaaaaaagaaaagaaaaaagaaagtaactgcaggcaggggactgggaaaaagagcatcgctgggggtgggggcagctcaagcagagggcacaggacgccagagggtgtggcagaggcaggagaggggagctgggggttccgtatctttgagaccgcctacagcccctggtgggatggaaaagggagaagcagacccaagcacagctgggaccacacagagcccgggcccagcctgtttgtgccccgccaggtgaaggtcatgcgatgcctggaacaccccaacgtgctcaagttcatcggggtgctctacaaggacaagaggctcaacttcatcactgagtacatcaagggcggcacgctccggggcatcatcaagagcatggtgagtcctgggcagagccagccacccccgctgtgcggccccgggcaaagcagctccctctgtgagcctcagtctcatctcttcaatggggggaagccacaggggtctcaaaggccctctgaaccctgattcctaatcaaaaaggggagcgactgactccatctaaagctaggaaaggccaggtacaatggtgcacacctgttattctggcactttgggagcccaaggcaagaggatcactcgaggccaggaattcaaggctgcagtgagctgtgatctcaccactgcactccagcctggaccacacagcaagaccctatctcaaaaactaaaataaaattcagagctttccttaaggatttgaataaaattacaaatccatctttagaaataaagtgctcaggccaggtgcagtggctcatgcctataatctcagcactttcagaggctgaggccagcagatcacctgaggtcaggagtccaagaccagcctggccaacatggtgaaaccccgtctctactaaaaatacaaaaattagctgggcctggtggcaggcacctgtaatcccagcactttgggagactgaggttggcagatcacctgaggtcaggagttcgagaccatcctggtaacccgtctctactaaaaatacaaaaaattagccgggcaaggtggcaggtgcctgtagtcccagctactcgggagactgaagcaggagaatggcgttgaacccagggggcagagcctgcagtgagccaagatcgcaccactgcgctctagcctgggtgacagcgagattccgtctcaaaaaaaaagcacttggaggaagcctcacagagtcctgtgctggaccacaccctggggatccagtcctggcctccagccccatttctgtaccaccctgagaccatgggatcttcctcaggttggattaccttgtatccaaggtgtggaccctatgggctcctgctaggtgtaacttgacacaacgggttccgttgtcaggtgcaatttagaaactctgggctaggccaagcgcagtggctcacacctgaattcccaaactttggaaggccgaggcaggagggtcactagaggtcaggaggtcaagaccagcttggacaacataatgagatcccaatcccatctctacaaaaaaaattaaaaaattagccaaatgtggtgacacatgcctgtggttccagctccacaggaggctgaggcagaaggatcacttgagcacaggaggtcgaggctgcactccagcctgggtgatagagtgagaccctgtctcaataaaaaataaagatctccaaggggatgaggtttgagaatgaggcgtctcccccaaatgatttgagcccaaagccccgttctcctggcatggctcagtgctgccactgcgcaggtgaccttgctgggcccttctacctcttacctgtctgtgaaagtaggttctaattttttaaaaacctagaaagatgagttttttgtttttgtttttgtttttcccgagatggagttttgctcttactgtccagcctgaagtgcaatggcgtgatctcggctcactgcaacctccacctcccaggttcaatcgattctgcctcagcctcccgagtagctgggattacaggagcccaccaccacacccggctaatttttgcgtttttagtagagacagggtttcaccatgttggtcaggctggtctcaaactcctgacctcgtgatccaaccactctgacctcccaaagtgttgggattacaggcgtgagccaccacacctgacagaaagatgagattttatagaaaataaatatagcttgttttctcagaggaggcagattgggagctatagaggaatatccctgcttagagtttgaaatcagttctgttaggaaataatgtttgtaggggccgggtgcggtggctcacgcctgtaatgccagcactttgggaggctgaggcaggtggatcacttgaggttaggagtttgagaacagcctggccaacatggtgaaaccctgtctctactaaaactacaaaaattagctgggtttggtggtggacacctgtaatcccagctacttgggaggctgaggcgagagaattgcttgaggccgggtgcagtggctcatgcctgtaatcccaacactgggaggccaaggtgggcagatcacctgaggtaaggagttcaagaccagcctgaccaacatggtgaaaccccgtctctactaaaaatacaaaaaattagctgggtgtggtggcgcatgcccatagtcccagctactcaggaggctgagacacaagaatcacttgagccccggaggcgaaggttgtagggagctgagatggtaccactgcactccaccctgggtgacagagtgagactccatctaaagaaaaaaaaaaaaggaaataatgtctgtgagctgtgttgactcatactccttagaagcagacagttgtgggtgcccgaagaaatcggggtgttggggagcccagggaccctctaggacgcttgcctcttcctgcctctgtctcatgcaaccatccctgccatcggggcccccaccggccccaccctggccattctttctccatcccaggacagccagtacccatggagccagagagtgagctttgccaaggacatcgcatcagggatggtgagtgagccgggtgctctagctccattcataatcccaccaggaatttgcaaacagaacccacaaagaagctttgaaagagggcagagggggtcgatgggagagtgggaagaatcgtcccgactggcctgattggggtgggagcagagggagttcctggggagccaggatgggctggggtccctctgcacagctgccccctgactcccgtgtccccgtccctaggcctacctccactccatgaacatcatccaccgagacctcaactcccacaactgcctggtccgcgaggtgagtaccagggccccacgtggctgggtgtcaggagacagcaggagcccatccaaccccagcctcagggccttcccagaactggaggcccctccatgttgcctccatgacttcaatttgaggtgggggtggggggcagcagcccgtggggaagagcgcagggtcaggaggcagacagacctgggtttgagtcctgtctctgccactgactcatggtggaccatcagagtcccaggctggtaggagggtctcataaatcaatgaaggagaaagtgacatgtaagctacaaaggaccaggaccgtggtcttcatagagcacagcccatggcagagtggccatgggctacaccagacagcaccagcatctgggggccacagagtgggggcataggcgtatgggctggagtggtcagggcaggcttcctgaaagaggaggcttggccagacacagtggctcacacctgtaatcccagcactttgggaggccgaggcaggcggatcacgaggtcaggagatcgagaccgtcctggctaacatgggcactgtggctcacacctacaatcccaacactttgggaggccgaggtgggtggatcacttgaagccaggagttcaagaccagcctggccaacatggctaacacggtgaaaccccatctctactaaaaatataaaaaattagccgggcgtggtggcaggtgcctgtagtcccaactacttgggaggctgaagcaggagaatggtgtgaacccgggaggcggaacttgcagtgagccaagatcgcgccaccgcactccagcctgggtgacagagcgagactccatctcaaaaaaaaaaagaggaggctttaggtggatatttaagcaggggacgggcaggcaaagagcccagtgtctaaggattgtcaagggaggagagcccggttctccaccaaaagcacaggagcgagtaaccatgcccatctggagaggtggtgtattcgtgtcctggggctgccatcatgaagtactgtgaaccagatggctcaaaacaacagaaatgtgctgggcacagtggctcacacctaaaatcccagcaatttgggaggccaaggcaggtggattgcttgagctcaggagtttgagaccagcctgggcaacattacgaaagcccatctctgccaaaaatacaaaacggaatagccagccgtggtggcataagcctatggtcccaactacctgggaggctgaggtgggaggatcacttgagcctgggaggtagaggttgcagtgagccaagattgtgctactctactccagcctgggagacagagccagaccctgtctcaaaaaaacaaaacaaaacaaggccaggcactgtggctcacgcctgtaatcccagcactttgggaggccgaagtgggtggatcacttgaagccaggagttcaagaccagcctggccaacatggcaaaaccctgtttctactaaaaattcaaaaattagcaggcatggtggcgcatgcctgtaatcccagctactcgggaggctgaggcaggagaattgcttgaacccaggaggcagaggttgtagtgagctgagattatgccactgcactccagcctgggtgatagagtcagacaccgtctcaaaaaaaaaaaagcatcacatggcaagaggggctgacaagagacccccaaactgaccattatacagacccactcttgtgataactaacctggtccctcaataacccattaatctgttaattcatacagagccctcatgacccaatcacctcttacaggccctgcctcttaataccgttagagtcaggccaggcatggtgacatgggcctgtagtcccagctagttggaaggctaggtgggaggatcccttgagtccaggaggtaaatgttacagtgagctctgattgtgtcactgcactccagcctgggcaacagagcgagcccctgtttttaaaacagcaacaagccaggcacagtggctcacgcctgtaatcccaacactttgggagactgaggcaggcagatcacttgaggtcaggagttcaagaccagcctcaccaacacagtgagacccctctctactaaaaatacaaaaattagctgggcgtagtggtgggtgcctgtagtctcagctactcatgagactgaggcagaattgcttgaacccgggaggtggaggttgctgtgagccgagatcacgtcactgcactccagcaacagagtgggactccatctcaaaaaaaataaaaaataacagagatctgtgttggcttacacctgtaatcccagcactttgggagtccaaggtgggcagattgcttgagcccaggagtttgagaccagccaggcaacatggcaaaaaaataaaaaaatttgtctctacaaaaaaattaaaaaattagctggcatggtggtgagtatctatagtaccagctactcaggaggtggaggtgggaggatcgcttgagcctgggaagttgaggctgcaatgagctgtgttcgtgccactgcactccagcctgggccacgggagggagactctgcctcaaaaaaaaaaaaaaaaaatcaaacccgaaaagcaaaaaacatagacctcacctgcttattgggaatattcaagataaaattaggccaggcacggtggctcacgcctgtaatcccagcactttgggaggccgacgtgggcggatcacgaggtcaggagatcgagaccatcctggctaacacggtgaaaccccgtctctactaaaaatacaaaaaattagctgggcatggtggcaggcgcctgtagtcccagctacttgggaggctgaggcaggagaatggcgtgaacctgggaggcagagcttgcagtgagctgagatcgtgccactgcacttcaacctgggcaatagagcaagactccaactcaaaaaaaaaaaaaaaaagataaaattgggccaggtatggtggcttactcctgtaatcccagcactttgaaaggctgaggcaggtggaccacttgaggccagaagttgaagaccagtctgggcaacatagcaagaccctatctcaatcagtcaatcaacctaaataaatagtaaatctggtggcatgccaagcacaggacctgggtctataatcaaaattcctgtcttgatgggcacagtggctcacacctgtaatcccagcactttggtaggccacagtgggtggatcacctgagatcaggagttcgaaacctgcctagccaagtatggtgaaacccgtctttactaaaaatacaaaaattagccaggcatggtggcaggcgcctgtaatcccagctactcgggagggtgaggcaggagaatcgcttgaacctgggaggcggaggttgcagtgagccgagatcatgccactgcgctccagcctgggtgacagagcaagactccgtctgaaaaaaaaaacaaaagaattcctgtcttctctccgaaacaaagcagcatcagtgcccccgcaggtgggagggagcgcttgcaggagggagcagtgggtccgccacgacggtctggggagcaggtggggagggggcagagggtgcagcgtgtggtgggagggaggaagccacactgctatcttcaggtgcttcccgcagctccatttgcaaagagcggatgggtttggggaaggaaggggtccccaccctgtgccaatacagcgtatcagaggtatgttctctgggctgtctacgggttggcttggggtcctggggaggggcaggccaagcgggcagtactaggatcgggtcccagcatgacccggcttcaccttcccagaacaagaatgtggtggtggctgacttcgggctggcgcgtctcatggtggacgagaagactcagcctgagggcctgcggagcctcaagaagccagaccgcaagaagcgctacaccgtggtgggcaacccctactggatggcacctgagatgatcaacggtgagtggttcagccctgcccatcatggccctcacgggaagccatgggggagcccaggagagctgtaacctcccaagcccctggcccctcccagcctccttggctcttcagttaccctgtgggtcctgttgctcctataacacacttagtggcagccaggcacggtggctcacgcctgtaatcccagcactttgggaggctgaggtgagtggatcacctgaggtcagtagttggagaccagcctagccaacatggtgaaacccccattctttactaaaaatacaaaaattagctgggcatggtggcgggtgcctgtaatcccagctactagggaagctgaggcaggagaatcgcttgaacctgggaggcagaggttgcagtgagccgagatcgcgccattgcactccagcctgggtgacgagcgaaactccatctcaaaaaataaataaatagaagacacttagtggcttaaataaatgatcatacagttctggagtctgaagtccagcgtcagcctcaccgggctgaaatcaaggcgccggtagggtgagctccttctgcaggctccggggcacctgtttcctgaccttttctggctcgtggaggcttcctcattcctcctgttgctgccccctcctctgtcttcagggctggctgcaaagcatcttctcttctctgatctctgcatccatccccgcatctctttccctggctctaaccttcctcctttttttttttttttttaaagagggtctcgctctgttactcaggctggagtgcagtggtgccaccatagctcactgcagcctcaaccttctgggctcaaactgtcatcccaccccagcctcctgaatagctgggaccacaggcatgcaacaccacacccagctaatttttttattttttattttttatttttttttgagacagagtctcgctgtgtctcccaggctagagtgcagtggcgtgatctcagctcactgcaagctccgcctcctgggttcacgccattctcctgcctcagcctcccgagtagctgggactacaggcgcccgccaacacgcctggctaattttttgtatttttagtagaaacggggtttcaccgtgttagccaagatggtgtcgatctcctgacctcgtgatccgcccgtctcggcctcccaaagtgctgggattacaggcgtgagccaccgcgcctggccaattttttaaatttttaatagagacgggggtatcactatgttgcccaggctggtctcaaactcctggcttcaggcgatcctcctgccttgacctttcaaagtgctgggattccaggcatgagccaccatggccctccatccttctgatagggacccttacggtgacattgggcccacctggataatccaaaagcagccctccatctcaagaccctcaacttaatcccatctgcagagtccgatggaaggtgggacgtatacaagtcccagggatcaggacgcagtcatctttggggatcatagttctgcctcccacagggtctgcttccctcagtccatttctttgctgtcaatggtcctatatatgcccagattataggttataaagtccttctacaagcaggtgacacatgaacacaggttcagggcaggcagaccccagccatcacctcatcatagttaacctagttaaattagcctggcatgtggcgtggtgcctaatgcctgtggtcccagctactcaggaagccaaagcgggagatttacttgagccaaggagatcaaggctgcagtgagctatgatcataccactgccttctagcctgggcaacggagtgagaccctgtctcaagaaaacaaaaaataggccaggcacagtggctcacacctgtaattccagcactttgggaggctgaagcaggcggattgcttgaggccaggagttcgagaccagcctggccaacatggtgaaacgctgtctctactgaaaatacaaaaattacccgggtgtggtggcacagctactagggaggctgaggcaggagaatcacttgaacccaggagcagaggttacattgggccaagattgcaccactgcactccagcctgggcaacagaggaagactgtgtctcaaaaagaaaaaaaaaaaaaccttcctgtaatcccagcactttgggaggctgaggtgggcggatcacgaggtcaagagattgagaccatcctggtcaacatgatgaaaccccatctctactaaaaatacaaaaaaattagctgggcgtggttgcacgcgtctgtagtcccagctacccgggaggctggggcaggagaatgatgtgaacccaggaggcggagcttgcagtgagccgagatcgcaccactgtactccagcctgacgacagagtgggactctgtgtcaaacacacacacacacacacacacacacacacacacacacacacacacacacagagttaacatagcccgcaaagaagactataaaacagtcttagtggccgggcgcagtggttcacgcttgtaatcccagcactttgggaggccgaggcaggtggatcatgaggtcaggagtttgagaccagcctggccaacacagtgaaaccccatctctactaaaaatacaaaaattagctggacatggtttcgggcgcccgtaatcccagctactcaggaggctgaggcaggagagttgcttgaacccaggaggcagaggcaggagagttgcttgaacccaggaggcagaggttgcagtgggcgacagagcaagactctgtctcaaaaaacaaaaaagtcttagtgtttcctatgtttagggattagtgtgaggattaaaggttgtaaactcatttccacctagttggcattcagtaaatgagaattgacatttagtactaattgtttcgggtattttgttttttgttttttgttttttgttttttctgagaccgagtcttgctctgtcatccaggctagaatgcatggtgcgatctcggctcactgcaactccgcctcccgggttcacaccattctcctgcctcagcctcccacgtagctgggactacaggcgcccgccaccacgcctggctaattttttgtatttttagtagagacggggtttcaccatgatctcgatctcctgacctcgtgatccacccgcctcagcctcccaaagtgctgggattacaggtgtgagccaccgtgcccggccagttttttgtttttgagatggagtcttgcattgtcacccaggctggagtacagtggcgtgatctcggctcactgcaacctccacctcctgggttcaagtgattctcctgcctcagtttccctagtagctgggattacaggcacctgccaccatgcctggctaatttttctatttttagtagagatggggtttcaccatgttggccaggctgatcttgaactcctgacctcaggtgatccacccgcctcggcctcccaaagtgctgggattacaggtgtgaaccactgtgcccggccatgtaccgattatttttaacatcattaagtagctggtatcattcccattttacaataaggaaactgaggctcagagagtctgtgtcagtttcctgaggttgctgtaataaattgttagaaacttgattatttaaaacagcagaaaatggtcaggcacagtggctcacacctgtaatcccagcactttgggaggccgaggcgggcagatcactggaggtcaggagttcgagaccagcctggccaacatggtgaaacaccatctctactaaaagtacaaaaattagctgggcatggtggcaggcgcctgtaatcccagctactcgggaaattgaggcaggagaatcgcttgaacccaggaggcagaggttgcagtgagccacaatcgtaccactgcactcttgcctggacaacaaagcaagactccatctcaagataaaataaacagcagaaatttattccctcttagttttggaagccagaaggttgaaatccaacagggctgcgctccctccagggcgatctaggggagaatgcattccttgcctcttccaccttctggttgttttgcattcctgggcttgtggccgcatcactccagtctccacccctgtcttcacagggccacctcctcctcttctgctgtgtcttctctgtgtctctctcaagagggcatttgcagtggcatttggggcccacccagatcatccagcatcatctcatctccagatccttaacttaatcccatctgcaaaagaccctttttctgacccagtaacattcacagattccagagacctgacatggttcccttttgggaccagcacagagttcatgacttgtgcaaagtcacgcagctgatcggtgcctcgaactccttgtccagggctctgccccttgctcctcagagctcccaaaggcttgctcagacctggtggggttgggggaaagagcctaagcctgggttcccatagaggttgccggcatctgcctcctgggcctggacctcccggccggggcatcctcccagctggcctggtcccctgccttttggcatccctggcacccccatgtgttcatctgctgacagtcggtctctttatccaggccgcagctatgatgagaaggtggatgtgttctcctttgggatcgtcctgtgcgaggtaggtccagggttgggtagcagcggtgttgaggcctgggctcctccccactcacccaggctgcaggctcagcatctgcaggggcctcatgccaggaagcctgcccacagcaaggcatgggctggcccccatggggtactgcagtcaggctgcagccaggcccagtgccacctgccctcaaaccacctggatggcacccagatgcccaggctgagggccccctggagtaactgccgggccttgtactggacagatcatcgggcgggtgaacgcagaccctgactacctgccccgcaccatggactttggcctcaacgtgcgaggattcctggaccgctactgccccccaaactgccccccgagcttctaccccatcaccgtgcgctgttgcgatctggaccccgagaagaggtgagtggggtggggccctggcctgggagacggtggggccgattcccgggacagccagacccaccgttccccacccacctgtcacccaggccatcctttgtgaagctggaacactggctggagaccctccgcatgcacctggccggccacctgccactgggcccacagctggagcagctggacagaggtttctgggagacctaccggcgcggcgagagcggactgcctgcccaccctgaggtccccgactgagccagggccactcagctgcccctgtccccacctctggagaatccacccccaccagattcctccgcgggaggtggccctcagctgggacagtggggacccaggcttctcctcagagccaggccctgacttgccttctcccaccccgtggaccgcttcccctgccttctctctgccgtggcccagagccggcccagctgcacacacacaccatgctctcgccctgctgtaacctctgtcttggcagggctgtcccctcttgcttctccttgcatgagctggagggcctgtgtgagttacgcccctttccacacgccgctgccccagcaaccctgttcacgctccacctgtctggtccatagctccctggaggctgggccaggaggcagcctccgaaccatgccccatataacgcttgggtgcgtgggagggcgcacatcagggcagaggccaagttccaggtgtctgtgttcccaggaaccaaatggggagtctggggcccgttttccccccagggggtgtctaggtagcaacaggtatcgaggactctccaaacccccaaagcagagagagggctgatcccatggggcggaggtccccagtggctgagcaaacagccccttctctcgctttgggtcttttttttgtttctttcttaaagccactttagtgagaagcaggtaccaagcctcagggtgaagggggtcccttgagggagcgtggagctgcggtgccctggccggcgatggggaggagccggctccggcagtgagaggataggcacagtggaccgggcaggtgtccaccagcagctcagcccctgcagtcatctcagagccccttcccgggcctctcccccaaggctccctgcccctcctcatgcccctctgtcctctgcgttttttctgtgtaatctattttttaagaagagtttgtattattttttcatacggctgcagcagcagctgccaggggcttgggattttatttttgtggcgggcgggggtgggagggccattttgtcactttgcctcagttgagcatctaggaagtattaaaactgtgaagctttctcagtgcactttgaacctggaaaacaatcccaacaggcccgtgggaccatgacttagggaggtgggacccacccacccccatccaggaaccgtgacgtccaaggaaccaaacccagacgcagaacaataaaataaattccgtactccccacccaggtcctgcgtggcgatgtgtgtctggggccctggggaaatagtcaaggtaagaggagttagtcttccctgaccagaagacaaggatgagtgtggtggctcatgcctgtgatcccagcactctgggaggctgagacaggacgatcccttaagcccaggagttcaagaccagtctggacaacatagtgagatcctgtctctacaaaaatttttttttaattagttgggcagaggccaggtgtggtggctcatgcctgtaatcccagcactttgggaggcagaggcgggtggatcacctgaagttaggagttcaagaccagtctggccaacatggtgaaaactcgtctctactaaaaatacaaaaattagccgggcgtggtggcacatgcctgtagtcctagctacttgggagactgaggcaggagaatcgcttgaacccgaaaggcagaggttgcagtgagccgaggtggtgccattccactccagcctgggaaagagcgagactttgtctccaaaaaaaaaaaaaaaaaaattggcaggccaggcacagtggctcacacctgtaatcccagccctctgggaggccgaggcaggaggatctcctgaggtcaggagtttgagaacagcctgactgacatagtgaaaccccatctctactaacaatacaaaattagccaggtgtgatggcacatgcctgaaatcccagctacttggggggttgaggcaggagaattgcttgaacccaggaggcagaggttgcagtgagccgagatcgcaccattgcaccccagcctgggcaacaagagcgaaactccatctcaaaaaaaaaaaaaaaaattagttgggcatggtggcatgcacctatagtcccagctactcaggaggctgaggtgggaggatcctttgagcccaagagatcaaggctgcagtgagccatgtttgcaccactgcactccagcctgggcaacaaaacaagactctgtctcaaaaaaaaaaaaaaaaaaaaaaaaaggcagggatggaggggggaagagaacacagcccagttttaggtggagctgaggtggtggcccagccaggacaagtgaagagtcttcagaggctgggtttggagggccgtgcatattccggaggtactgctttcatacttaaatgttttcttgtaaaactcacacctgtaatcccagcactttgggaggccaaggtgggcggatcatctgaggtcgggggttcaagaccaacctgaccaacatggagaaaccccgtctactaaaaatacaaaaaattagccaggtgtggtgacacatgcctgtaatcccagctactcgggaggctgaggtaggagaattgcttgaacctgggaggcggaagttgtggtgagctgagatcgtgccattacacttcagcctgggcaacaagagcaaaactccatctcaaacaaaactaaactaaactaaactaaagggttctatcaagaagatgggctgcacgtgatggctcacacctagactcccagcgcttcaggaggccgaggtggaaggatcacttgaggccaggagttcaagatctgcctgggcaacatagcaagaccctgtttttacccaaaaaataaaaaaattacccagatgctgtggtgtgtgcctgtagtaccagctactgagaggctgaggcaggaggaccgcttgagcctgggaggtcaaggctgcagtgagctgtgatcgtgccactgcactccagcctgggtgacacagcaagaccttgtctcaaaaataaataaaacattttaaaaacacactaggtattgcaaatacagggcatttaatttggttttttgtttctgttttgttgttgttttgagacaggtctcactctgtcacccaggctggacagcagtggcacagtcatggctcactgcagcctcaacatcccagggttgagtaatcctcccacctcagcttctcaggtagctgactatagatacacgccactacaccaagttaatttaaagaaaaaaaatgtgagaggccaggcgcagtggctcacgcctgtaatcctgacactttgggaggccgaggcaggcggatcacctgaggtcaggagttcaagaccagcctggccaacatggtgaaaccccatctctactaaaaatacaaaaattagccaggtgtggtggcaggcacctgtaatcccagctactcgggaggctgtgacagaagaatcatttgaacctgggaggcggaggttgcagttagccgagatcacgccattgcactccagcctgggtgacaagagtgaaactgcctctcaaaaaaaaagtttagaggcaaggtctcactttcttctctaggctggcctcaaactcctgggctcaagcagtctcctgggcctcccaaagtgctgggattacaggcatgagactccatgctcagccacatttaatacgagaatttttttgttttgtttttttggtttttttttttgagatggagtctcgcactgtcacccaggctagagctcagtggcacgatctccgctcactgtaagctctgccttccgggttcacaccattctcctgcctcagcctcccgagtagctgggactacaggcgcccgccaccatgcccggctaatttttttctatttttagtagagacggggtttcaccatgtgaaccaggatagtctcgatctcctgacctcatgatccacccatctcggcttcccaaagtgctgggattacaggcgtgagccactacacccagccaatacaaggaaatttttacatggctgttgaaagacagaggaaaggccaaaagtggacacttaggtaacccagagatgattgcaggagagagctaccaccctcggtggggggattgaaggggagaggtgatcacttgagttatctaatgttgcatagggaagtcacctctcaacttggttgcttaaagtaacagggatcactcattgctcatgatttctggttttttttttttttttttgagacggagtctcgctctgtcgcccaggctggagtgcagtggcacaatcttggctcactgcaagccattctcctgcctcagcctcccaagtagctaggactacaggcgcccgccaccacacctggctaattttttgtatttttagtagatacagggtttcaccgtgttagccaggatggtctcgaactcctgacctcatgatccgcccaccttggcctcccaaagtgttgagattacaggcgtgagccaccgcgcccagcttgatttctgtttgtcaagaatttgggagtcattttggtggggaatttgtatgtgggggtctctcctggggctgcagtcctttgagggtgtaactggggctgaagttcccttccaagaaccctcatatgtggctcactcacatggcgggcaatttggtgctagcagttgattctacagagaaaaacgggcttgagccaatgtgctacaagccaatactatgacaccaggcttttggttttttgtttttatgatttatgtatgtattttttttttttttgagacagaatctcattctatcaccctggctgcagtgcagtggcacaatctcggctcactgcaagctccacctcccaggttaaagggattctcgtgcctcagcctccctagtagctgggactacaggcgtgcaccaccatgcctggctaatttttgtacctttagtagagacagggtttcactatgttggccagactggtctcaaactcccgacctcaagtgatccacctgcctcagcctctcaaagtgctgggattacaggtgcaggcaaccatgactggccgttttttttgtttttaaagttggggtctcactatgttgtcccggctggtcttgaactccaaggctcaagtgatcctcctgcctcgacctcccaaagtgctaggcttacagtcatgagccaccatgcccagctgacaccaggcttttcagaaaagaatagctttattgcaagtcaaccagtaaggagacagaagtctagctcaaatctgtccccctgtgctggctttaaggcggtaattttattaggaaaggtttagggggtggattctgatattaggtgattggcggaagcaaaggggaggcctggaaagtgctcaggcatgcgcagttccctcttcatgttatctcatggggggcatgtgcaaattccgggggtggttagtatgtaacatgcactggaaattcgggctgtgacatcagcaagcttgttctgtgcaaactgcagttggccatattggtcccaatctatttcagccagcgtgttaatcccaccagcagatgaatttcagcatttctgcaagtcgtttctttttttatctgccatcctgcaaactggaaaatttctgctagtcactggtttctttaactctttggggcacggtttcactggtaggaggcctcagtttatcccatgggcctctccatagggctacttcagagtccccacagcagcctccagaatgaatatcccaagaaagaaaagaaaagtgccactaggggccgggtgtggtggctcacgcctgtaatcccagcactttggaagtctgaggcaggaggatcccttgagcccagaagttcaagccagcctgggcaatgtagggagacgccatctctactaaaaaaaaaaaaaaaaaagaagaagaatttaggccgggcgtggtggctcacgcctgtaatcccagcactttgggaggctgaggcaggcggatcacgaggtcaggagtttgagaccagcctggccaagatggtgaaaccctgtctctactaaaaatacaaaaattagccaggcacggtggcgggcgcctgtaatcccagctactcaggaggctgaggcaggagaattgcttcaacctgggaggcggaggttgcagtgagccaagatcgtgccactgtactccagcctgggtgacaaagcaagactccatctcaaaaaaaaaaaaaaaaaaaaaagaaagaaattagctgggtatggtggcacacacctgtggtcccagctatttgggaggccaaggcaggaggattggttgagcccagaaggtcaaggctacaatgagccagattgtaccattgcactccagcctgggcaacagagtaagacgccatctcaaaaaaagaaaagaggccaggtgcagtggatcacacctgtaatcccaacattgtgggaggccaagacaggatcccttgaggccaggagtttgagaccagcctggccaacttggcaaaaccctgtctttaccaaaaaatacaaaaataagctgggcgtggtggcccactcctgtaatcccacctacttgggaggctgaggcgggagaatcacttgaacctgggaggcagaggttacagtgagccgagactgcgctattgcactccagcctgagcgacagagcgagactccgtctcaaaaaaaaagaaaaaaattaccacaagcgcagctctgggtgcattgcttatgaattaactcctgctttgcaaggagcagctctggttcaataaaagattgctgtgtaacaccaccagcttacccttgaattctttgagtgaaaccaaaaaccctcccaggctaatccacaatttgggggcttagctatatgcctgtatcggtactaattgtcttcattattgtagctttgttgtaacttttgaagttgagaaatgtgagccttccaactttgtttttctttttctagactgttttggctatttgaagtcccttgaatttccacaagaattttttttttttaagtgccaagatctcagctcactgcaacctctgcctcccaggttcaagcaattctcccaacttagcctcccaagtagctgggactagaggcatgcaccaccatgctaatttttgtgtttttagtagagatggggtttcaccatgttgtccaggctggtctcaaactccttgcctcaagtgatccacccaccntcaggctcccaaagtgctgggattatagatgtgagccaccatgcccagcctccacatgaatttttaggatgagcttgtcaatttctgaaaacaagccagctggggatttgtttgtttagacacaagatgtcattctgtcacccagactggagtgcagtggcacaactcctagctcactgcagcctggaacccctaggctcaagtgatcctctcatctcagcctcctgagtaccagggaatacagacacatgccaccatgccctgctaattttttaatttttgtagcgacatggtctcaaactcctgcccaaccaggctgatctctttttttttttgagatggactctcactctgtcgcccaggctggagtgcagtggcgcaacctcgcctcactgcaacctctgcctcctgggttcaagcgattctcctccctcagcctcccgagtagctggtgggcatgggcgcctgccaccatgcccggctaatttttcatatttttagtagagatggggtttcaccatgttggccaggctggtctcgaactcctggcctcaagtgatcctcctgcctcagcctcccacagcactggaattacaggcatgagtcactgttcccggtccagctgaggattttgacagggattggtttatgtctatatgtgaactggggagtattggaatattgacatcgtaataatattaagtctctcaggccaggcatggtggctcacacctgtaatcccagcactttgggagctcgaggcaggtggatcaattgaggtcaggagttcaagaccagcctggccaacatggcgaaaccccgtctctgctaaaaatacaaaaattagccaggtgtggtggtgtgtgcctgtagttccagctacttgggaggccgaggcaagaggatcacttgaacctggtaggcagaggtggcagtgagcctagattgcaccactgcactccagcctgggtgaaagagcaaggctctgtctcaaaaaaaaaaaaaaaaaaaggaagaaggaggaggaggagggggagaaggagaaggggaaggaaggaggaaggaggaagaagaagaaatacctgaaactgggtaattttttttttgagaaaggatcttgctctgtttcccaggctggagtgcagtggcacaatcttggctcactgcaacaaccacctcctgggttcaagcgattctcatgcctcagcctcctgagtagctggaattgagatgtgcacaccacgcccagctaatttttatatttttagtagagacgcggtttcatcatgttggccaggctggtctcaaacccctgacctcaggtgatcaacccacctcagcctcccaagtgccgcaattacaggcgtgtgagccactgcgcccggcttcaaaagtaccatttaatggctgacaattacttgccctgaaatgtgaaacaaaattcatttactacattgtttttaagatagcacctgaccttcagtaatcggaaataatgatttcctataaataaaaaccactgcagtgcttttagtgattagtgtacatagagtttttcccctggctgtgacatcatattattaaaagcattaagcacctggaattcatgctgtagttgatttataagttacataatgtacaaagctccttttataagaatgttttgtggtcacaattacttcaaaacccaattacattcaaataatctaatagctcatgctttggcaattatagaagtgtgattttgacacatagaaattttatgaggttagcaaataaaaaacgctataaaagaggtgaacaatggttcctctgtttaaatttagagtgcagcaatatttaggtaatatttttcagttaatataatcagcctagaatatagcattgtaaatcatacagtgttttagaaatacggatctaaagaaggtaataccttttccaaattataaaattttggcaaatcaatacagtactttgtaatacaataaaactatgtttttgttggagtcatatatgactttaatcataatttccactgcaaaagcaccacctaaatactaaatcaattatgaaggcttttcatgacagtttataacagagtcagttgttttacacaaattaatatggcttttaaaaaattatataatttcttggccgggcacactggctcatgactgtaatcccagcactttgtggggctgagaccagcaaattgctgagctcaggagtttgagaccagcatggacaacatggcaagaccctgtctctaaaaataaaaatgttttaaaagctgcagagttaacacagtagagaaatcatgtgcatataaaatatgctacgtttccttctgggattggtccaaaactgctcacaaaaaacttcaaaactctactttaagaagttccaggccgggcacggtggctcacgcctgtaatcccagcactttgggaggccgaggcaggcgaatcacaaggtcaggagttcgagaccagcctggccaacatggtgaaaccccgtctctactaaaaatacaataaaaattagctcagcatagaggcgtgcgcctgtaatcccaggtactcgggaggctgaggcaggagagtcacttgaacctgggaggcggaggttgcagtaagccaagatcgcgctactgcactccagcccaggcgacagagcgagactctgtctcaggaaaaaaaaaaaaaaaagaagctccaataccaaattaaagtcgtttttcaagtattggtaaatcttccataaacagggcaacacttaatgatcaatagatcattcgactagggcttatgctggtggatctcttttgtttaaagctccaaactcagctgggcttggtgcttcacgcctgtaatcccagcactttaggaggccaaggcaggtggatcacctgaggtcagaagttcgagaccagcctggccaacatagtgaaacccccgtctgtactaaaaatacaaaaattagacaggcgtggtggcacagaaaaaaaaagtcaattatcctatttggggatttaaattatactattttttatttttttgagacagagtttcactctgtcacccagtctggagtgcagtggtacaatcttagctcactgcaacctccacctcctgagttcaagcgattctcctgcctcagcctcccgagtagctaggattacaggcaccagccaccacctggctaatttttgtattttttgtagagacggggtttcaccatgttggccaggctggtctcaaactcctggcctcaagtgatctgcctgcttcggcctcccaaagtactgggattacaggagtgagccaccacaccacctcgaccagccttttcctctataaatttaaaaaaaaaaaaaggccaggtgcggaggttcatgcccgtaatcccagcactttgggacggatcactgtaattccagctactcaggagcctgaggcaggaggatcacttgaacccaggagtcggaggttgcagtgaaccaagattgctccactgcactccagcctgggcaacagagcaagactccagctcaaaaacaaagaaaaaagaaaaaggccaggtaaggtgacttacatctgtaatcccagtactttgggaagctgaggcaggaggattgcttgagcccaggagttcaaggctacagtaagctagtaagctatgattgcaccactgtgctgcagcctgggtgacagagccagaccctgtctcatgaaaaaaaaaaaaaaaaaaaaaagaaaagaaaagaaaggaagaaaagtgccaaattgtttctcaaagcagttctagtgatttatggtctcacttgcagtatatcagattcttcgttgtccagatctttttaattttttacagactaacaggtacaatacagtatcttactgtggtactaatttgagtttccctgatttcctctatagttgagcatctttacgtgtttagtggccactcatgtttcttcagatcttctgcctgccttcctccctcccttcctcccttcctccctcccttcctcccttcctcccttcctccttcccgccctcccttccttttttttttttttttttttttttttgagacggagtcttgctctgtcgcccaggctggagtgcagtggcgggacctcagctcactacaagctccacctcccaagttaaatcgattatccggcctcagcctcctgagtagctgggactacaggcgcccgccaccacgcccagctaattttttgtattttcagtagagacagggtttcaccgtgttagccaggatggtctcgatctcctgacctcatgatccgcccacctcggcctcccaaagtgctgggattacaggcgtgagcgtgagccaccgcgcccggccccttccttctttttttttaaaaagagagacgggtgctccctttggcagcagatatactaaaaaagagagacgggaaggccaggcacagtggctcacacctgtaatcccagcactttgagaggccgaggctggtggatcacctgaggtcagaagttcgagaccagcctggccaacatggtgaaaccccatctctactaaaaatacaaaattagacgggtgtggtagtgcatgcctgtaatcccagctactcaggaggctgaggcaggagaatcaatgaacccgggaggcgaaagttgcagagagatgagattgtgccattgcattccagcctgggcaacaagagcgaaactacgtctcaaaaaaaaaaatgcataagttttgtgaacaaatatttcataattttctctactgaggtcttagactttttttttttacattttacagaatacttcatatcttctttgtctctcccctttttttttgcaatcaccttgaaaacattaagattcagatggtcctctaattttcctgtctcctgttatcctttgtggtgtgtgtgtgtgtgtgtgtgtgtgtgtgtgtgtgtgtgtgtttgagacagagtctcactctgctggacaggctgcagtagagtgatggcatctcggctcgctgcaacctccgcctcctgggctcaagtgattctcctgcttcagcctcccgagtagctgggattatcggcatgtgccaccacccctagctaatttttgtatttttagtagagacggggtttcaccatgttggccaggctggtttcaaactcttgacctcaagtgatctgcccacctcagcctcccaaactgctgggattacagacgtgagccactgcgcccagcctgttatcctttgtttttggaaggaagcatttgaaaaagagtgactctatcttgaataggggctgggtaagatgaggctgagacctgctgggctgcattcccagtaggtgagacattcttattcacaggatgagacagaaggttggcaggactggtatcacaagatacgggtcacaaagaccctgctgataaaacaggatgctgacagggcacagtggctcactcctgtaatcccagcattctgggaggctgaggcgggcaaatcacttgatgccaggagatcaagaccagcctggccaacatggtgaaaccctgtctctaccaaaaatacaaaaattacccagacatggtggcaggcacctgtactcccagctactcaggaggctgaggcaagagaattgcttgaactcgggaggcagaagttgcagtgagccaggatcgcaccactgcactccagacggggcaacagatcgagactccatcccaaaaaaaaaaaaaaaaaagaaaacaaaaacaggacgcagtaaagaagccagccccaaaacccaccaacggtgatgaaactgacctctggtcatcctcactgctcattatacactaattataatacattaccatgctaaaagacactcccaccaggactatgacagtttacaagtgccacggcaacacccggaagttaccctatatggtctaaaagaaggaagaaccctcagttctgggaaatccctgccctttcctggaaaactcatgaataacccatacttcgtttagcatagaatgaagaaataactgtaagtatactcagtcaagcagcccatgccactgctctgcctatggaggagtcattctttattcctttcctattctttttttttttttctttttcgagacagagtcccactctgttgcccaggctggagtgcagtggcacgatcttgactcactgcaacctctgcctcccaggttcaagcaattctcctgcctcagccttccgagtagctggaattacaggtatgcaccaccacacccagctaatttttgtatttttaatagagatggagtttcaccaggttggccaggctggtctcgacctcctgacctcaggtgatccacttgcctcagcctcccaaagtgctggaattacagacgtgagccactgcgcccggctattcctttattttcctgataagcttgctttcaggtcgggtgtgatggttcacatgtgtaatcccagcactttgggaggcctaagtggcaggactgcttgagcccagaaattcaagaccaaccagcgccacatagtgagtgagaccatatttctattaaaaaaaaaacgaaaacaaaaaaaacttggccaacatgacgaaaacctgcctctactaaaaaaatacaaaaattagccaggaatggtaacacatgcctgtaatcccagctactcaggaggctgaggcaggacagtcacttgaacctgggaggcagagcttgcaatgagctgagatcaagccactgcactcgagcctgggtgacagagcgagactctgtctaaaaaaaaaatacaaaataaaaaaaagaacttatttatgtaaccaaataccacctgttcacctgttccccaaaaacctgttgaaacaaaaataaataaataaatataaagaaataatttttatttatttattttattatattttgagacgaagtttcactcttgtcgcccaggctggagtgcaatggcgtggtctcagctcactgcaacctctgcctcctgggttcaagcgattctcctgcctcagcctcccgagtagctgggactacaggcacctgccaccacgcctggttaattttgtattttagtagagacagggtttcaccatgttggtcaggctggtctccagctcctgacctcaggtgatccacccgccttggcctcccaaagtgctggaattacaggtgtgagccaccacacccagcctttaattttattttctatagagaggagtcccataatattacccaagctggtctcaaactcttggcctcaataaatcctcccacctcagcctcctgagtagctaggactacaggagtgcaccaccatgcccagctaatgtttttatgttttgtagagatgagggtctcattatgttgcccaggctcgtcttgaactcctgggctcaagtgatccatcctcctgcctcagcttcccaaagtgctgggattacaggtgtgagcaaacatgcccagcctaatattattaatacatcgtagctgtccatatttatagggtgcatgtgaaattttgttacgtgcatagaagtgcgattgtaggaaccaaggaaaaaacttctgcttcaccttctcaaggtttgctgataaatcagctcacaaaaggcagattaattggaaaaagggggatacaaattgcattcacacgtatctggggagaaccacaccacagcgtgattacccaccaccccaaaggcattcagacgcttatataccatcttcttttttttttttaagtagagactgggttttcgccatgttgccaggctggtcttgaactcctgcactcaagtgatcttcccctcttggcctcccaaagtggcgctgggattaccgccatgagccactgtgcctggcactatatacatatatatagatatgtatacatatctatatctatagatatctatatatctatagatatctatatatctatatctatatgtatacatatctatatatatagacatgtgtatatatatctatagatatctatatctatagatatagatatactatcttgcagatacagaaagaataggggtttggatcctggtaaaacaggttatggcagggggaagaaagaggaattctattgaggggacataaaagattactgggggctaggcagagtggctcatgcctgtaatcctagcactttgggaggccaaggtgggcagatcacttgaggtcaggagttcgagaccagcctggccaacatggcgaaaccctgtctctactcaaaacacaaaaattagccagtcatggtggcacatagctgaaatcccagctactcaggaggctgaggcaggagaatcacttgaacccaggaggaggaagttgcagtgagctgagatggcatcactgcactccagcctgggtgacagagtgagactccatctcaataaaaataaaaataaaaataaagcattgctggggagaatgaatggatttaggaacagagattaacttgtacataattctctttggaatttcaatgagcctgagggagacattatcttgcggaagagtctgttcaggtgtggttccattcttgattttatagaaaggagaagaaaaaaaaacaattgttttccttgttgaggggggatgtctggatcttaggcagagaaagtaacttcaacttcatcctgtgctgtgggagaaaagacggtcttttagacacagtttatcgttactgctgcttttcctgtgtttggcctataccttcctgcctctttgaatgatgggtagaccagagtttgtgagtcaatttgtattagctgtgtgatctggagcaagctactgttgtcagaggagtttgaaccacagtgattccatcttgaatagggggtgggtaaaatgaggctgagacctgctgatattgacaggaggcagccaattgcctaggccaataggggcgggtccgcggtgaaaccccacctccaacccgaagacggtttaaagcctgaaactgaaggtacaagtttaaaccttagaccggattgagagcttaccttcctgtttgtcgcgctttcctctgattgatccccacccttcgcctattttacatatacccaccctttcctaattggttttctactctttctttttttttttgacagagtctcgctctgtcacccaggctggagtgcagtggtgcaatctcggctcactgcaatctccaccccccgggttcatgtcattctcctgcctcagcctccccagtagctgggactacaggcgcctgctaccacgcccggctaattttttgtattttttagtagagatgaggtttcaccgtgttagccaggatggcctcaatctcctgaccttgtgatctgcccgccttggcctcccaaagtgctggcattacaggcatgagccaccgtgcccggcggttttctactctttcatgaccacctttgagtagtgtctttgctttaactcacctcattagcataaactccagtgtgatcaaaaggactcattataaataacaaaagacattcctccaactcctggacttaagggatccctcaagcaagcctcagcctcctgaatagctgggactactcctttttgcatactcacaagccaatcagcacacactccccaccctgtgcctataaaggctccagactcagtcagcaggggaaaagacgacctgacttcggggaaggcaacctgcacttcccatcccctctccagctcccctctccactgagagtcgctttcattgctcaataaaattctccaccttcatcatccttcaatcgtccgtgtaacttcattcttcctggatgctggacaagagcttgggacccagtgagtgaggatacccagaaaggctgtcacactgggcctttgccctcgcctgtgaagggcagctgtccccatgtgatgaggcaaggggccagctgatctgctgacatgtcaccatctgtggacagcagaactaaaggagcactgtaataacaccctctctgcagcttcggggacacgggcaccctcacctaggtgctgctgctttcccctcaaggtgacgtgcctgctctggccatgggccctgcatacagcttgctcctgtgttggtgcctggagaagccagctggccagatcccacacttagtcacttgtgtgctccctcctgcaaggggttgagcacagggggctgagtagatggggcatcccttccatgagtccagcgaaggtgcctagaaaaaccctgcatcaccactgagctactttcccaggaggtgaggcattcccagtcacaggatgacacaggagggtggcacaagacataggtgacaaaaaaccttgctgataaaacaggttgcagcaaagaagccggccaaaacccaccaaaaccaaggtggcgatgaaagtgacctctggtaggctgggtgcggtggctcaacgcctataatcccagcactttgggaggcccaggcgggcggatcacctgaggccaggagtttgagaccagcctgaccaacatggagaaactccgtctctactaaaaatacaaaaaattagctgggcgtggtggcacatgcctgtaatcccagctactcaggaggctgaggcaggagaattgcttgaacccgggaggcggaggttgcagtgagccaagatcgtgccattgcattctagcctggatgacaagagtgaaactccatctcaaaaaatagaaagaaagtgacctctggtcgtcctcactgctcattatgtgctaattataatatattagcatgctaaagacactcccatcagtgccatgacagtttagaaatgccgtggcaacatcaggaagttaccctatattgtctaaaaaggggaggaaccggccgggcgcagtggctcatgcctgtaatcccagcactttgggaggccaaggcaggtggattgcaaggtcaagagttcaagaccagcctggccaagatgtgaaaccctgtctctactaaaaatacaaaaattagctgggcatggtggcgggcgcctgtaatcccagctactccagaggctgaggcaggagaattgcttggacccaggaggcagaggtagcagtgagctgagattgcaccattgcactccagcctgggtggcagagcaagactctgtctcaaaaaaaagtggggaggaaccctcagttccaggaattgcccgtgcctttcccagaaaattcatgaataatccacccttgttgggcatgtaatcaagagataactataaaaaatatccagccagcaaccttaggggatgctctgcctatggagtagacattctttgttcctttactttctttttttttttttttttttgtgagatggagtctcactttgtcatccaggctggagtgcagtggtgcaatcttggctcactgcaacctctacctccccagctcaagcgattctcctgcctcagcctcccaagtagctgggattacaggcgtatgtcaccacgcccagctagtttttgtattttttagtggagacagggtttcaccatgttggctagtctggtcttgaactcccaatctcaaatgatccgcccaccttggcctatcaaagtgctgggattacaggtgtgagccactgtgcccagcctattcctttactttcttaatatacttgcttccactttactccatggactcgcctggaattgtttcttgcgtgagattcaagaactctctcttggctgggtgtggtggctcacgcctgtaatcccagcactttgggaggccgaggcaggtggatcatgaggtcaggagtttgagaccagcctgaccaacatggggaaaccctgtctctactaaaaatacaagaaaattagccgggcgtggtggcacgtgcctgtaatcccagctactcaggaggctgaggcaggagaatcacttgaacccgggaggcagagggcgccactgcagtccagcttgggcaatagagtgagaccctgtctcaaaaaaaaaaaaaaaaaaaaaaagattaaaaaagaaccctctcttggggtcttgattgggactcctttccagtaacagtgtgaaagaaaaataaaatcaccagaccccaaactcactatgtcaaagggcaaaaagctaagcttaggaactgagtcatacaggaaactgcattttcttttgttcctaaccagatagctgcaagattgaatgccacgtatctccacaggtggcttccctcaccctgaccatgtaaattcagcttaccttcacaggtacaggacaaataaaaaaatagaaatctggccaggcatgggggctcacacctgtaattccaacactttgggaggctggggtgagagaattgctggagctcaggggttggagatcaccctgggcaacccagtgagaggctgtctctacggaaaagattttaaattagcctggtgtggtagtgcacacctgtagtaccagctactcaggaggctgcattgggagtattgcttaagctcaggaggtcgaggctctagtgaggtgtgatcgcaccgctgcactccaacctgagcaacagaataagaccctgtctcaaaaaaaaaaaaaaaaaaaaaaaatcatggccgggcgtggtggctcacggctgtaatcccaacactttgagaggccaagggatcacctgaggtcacgagttcgtgaccagcctgaccaacatggtgaaaccccgtctctactatagacaaaaaattagacaggcatggtggcacatgcctgtaattccagctacttgggaagctgaggcaagagaatcacttgagctgaggcggcagaggttgcagtgagccaagattgcaccattgcattccagcctgggccacaagagtgaaactctgtctcaaaaaaataacaataatttttttttttttttgaggtggagtcttgccctgtcacccaggctggaatgcagtggcacgaccttggctcactgcaagctccgcctcccgggttcacgccattctcctgccccagcctcccgagtagctgggactacaggcgcctgccaccacgcccggctaaatgttttgtatttttagtagagacagggtttcaccatgttagccaggatggtctcaatctcctgatctcatcatccgtccgcctaggcctcccaaagtgctgggattacaggtgtgagccaccgcgtccggccaatatttttcttttttttaaatcatacttccaggtccnggtgcggtggctcacacctgtaatcccagcnctttaggaggctgaggtaggcagatcacaaggtcaggagttcgagaccagcctggctaacatggtgaaaccctgtctgtactaaaaactacaaaaattagctgggcgtggtggcacacacctgtaatgctagctactcaggaggctgaggcaggagaattgcttgagcccgggaggcggaggttgcagtgagctgagatcacactactgcactcctgcctgggggacaaagtgagactctgtctcagaaaaaaataataataataaatcatacttacccccaccctaagacaaaagcataattgacttcttcctctactctgtgtttactttatcttgtgtaaaatacagatatatttagcacaagatgaattcataatagactgttcctttttccctcctttcacatgtgttaaaagaaaaacttcagccaaattaaatttaagggagtttaattgagcaatgaacaatttgtgaatcgggcagcccccagaatcacagccgattcagacagactccagtgcagccatgtgatggaagaagatttatagacaaagggaaatgacatacagaagtcagtgaggtacaaaaacaactggattggctacaggtcggcatttgccttatttgaatatggctcaaacagttggctacatctgactggccaaaactcagtgattggcacagggtgtgggctatggccgagttatacctccgcttgttacagttcacaatgtacagaaaaacctttaggccaaattgaaatatgtaaagaagcagctttaggctaaacttgattaacgtatgtaagatgtggattcagtgatcatgaatgaaagcctcacagaaagtgaccacttatttcactaccttccctagtgtttttgttgttgttgtttgttttgttttgttttgttttttgagatggagtctcactatatcatccaggctggagtgcagtgaagcgatcttggctcactgcaagctccgcctcccgggttcacgccattctcctgcctcagcctcctgagtagctgggactacaggcgtccgtgaccacgcccggctaatttttttgtatttttagtacagacggggtttcactccgtgttagccaggatggtctcgatctcctgacctcgtgatctgcccacctcggcctcccaatgtgctgggattacaggcgtgagccaccgcacccggccaccttccctcctttttcatttctttcctccttcccctcctgcccactctttctcctttaaatattgaagtcctcaaaactctctggaaaagccatgggtcacagatttttctttggcttgggtctctttttcctgggcatgtcctcaaccttagcaaaataaacctctaaattcattgagtcccctcctctcccctcccctcctcttcccttcccttcccttcccctttctttgagacagggtctcactctgtcatccaggccagggtacagtggtgcaaatgatagggacaagaggcagggaaattctgggcagaagagggtgggtccccagagagggcattgccctcaagctgaaaaacctggaactgcagcccaaagtgagaactgacatccctgttttttgttttttggttttttttgagatggagtctccccttctgtcacccaggctggagtacaatggtgcgattttggctcactgcaacctccacctcccgggttcaagtgattctcctgcctcagcctcccgagtaatccgagccgggattacaggcacacaccaccacacccggctaatttttgtatttttattagagaaggggtttcactatcttggccaggctggtgttgaactcctgatttcgtgatccaccctccttgcctcccaaagtgctgggattacaggcatgagccaccgtgcccagccaacatcgctgctttcctgcttgaatgttgccttttccaaaaccacccttgacctgccctgcccccaatcctgtgcccataaaaaccccaggcccagctagcagagagaggagaagcagctggacgtcaaagaccatggttgaacattggagagaagtggcttgacttcagagggacagtttgctggagtagctttggaggagtatggccagggacagctggacttcagagaaagattaccttcctgctctgtccccttttcagctccccttcccgcttagagccactttcatcagcaataaagtctcctgcatttaccatcttcaattcatttgtgtgacctaattcctcctggacactgaaaaagaacttgggtgccacgagtgtggatgcaaaaggctgtcacaccgatcctccactaagctgttaacacttaagccattcacagacagcagagctaaaagagtactctaacactgcctctggggcttcaatagtctccggcaccctccgctagacactatcatggggctggtatggagatggctcttgctggcgcctaaaaactctcgccccgtctcctgcacctgctcacctgtgctccctctcctgtgaggggtggagtagtgagtgagtggagttcacccctaccagcaccaaagcagctggctagttcttaggcaacatcctgcttcacaatcacagctcactgcaacctcccacctcccaggctcaagtgttcctcctgcctcagcctcccaaagtgctgggattgcaggcatgagccaccatgcccagccagtcattttctttggtttacactactttacctccctgagccttattttccccaaatgagaggtagaaactcctctgttgggaggattaaatgagatatgtctcaaatttttgttgaaaactggacattttattttatcttattttacttatttttgagacaaggtctcactcactctgtcactcaggctagagtgcagtggtgcaatcttggctccctgaaagcttaacctcctgggctcaagtgatcctcctgtctcagcctcctgagcagctgggactataggctccagccaccacacttggctaatttatttttatttttattttttgtagagacagagtctcactatgttgcctaggatggtctggaactcctgggctcaagtggttctcctgactcggccccacaaagtgctggcattacaggtgtgagccatggcacccagcaaaaactggacattttaaatcatgtattgtaattctaaattctgatgtcctggtggtagctgttgtagattttgacattgttgttgtttgctggttgtctgtttggttgtttaataacttgaagccactaaaggaagcctctgttttgttttgtgattcttgcttttattttcaagactggcttcctaggggtccatctctgaatcagcattgcttagtgcccagccactgtttggtcagaaggtttccgtaaacaccttgacacactaagccttccttggtcaagaggacctgtgaggggggttgggacacaggttaaattatttcctcaagggcgttgacatttctttcttttttcttttttttttgagatggagtctgtctctatcactcaggctggagtgcagtagcatgatcttggctcactgcaacctctacctcccaggttcaagcgattctcctgcctcagcctcccgagtagctgggattacaggcgcccgccaccacacccaactaatttttgtattttagtagagatggggtttcaccaccatgttggccaggctggtctggaaccctcgacttcaagtgatccacctgcctcagcctcccagagtttgggattacaggtgtgagccaccacacctggcctctttttttcttttcttttctttttttttttttttgagatggagtttcgctcttgttgcccaggctggagggcaatggcatgatctcggctcactgcaacctctggctcccgggtacgagcaattctcctgcctcagcctcccaagtagctgggactatagacatgcgccacacgcctaattgtttgtatttttagtagagatggggtttcaccatgttgaccaggcaggtctcgaactcctgacctcaggagatctgctcacctcagcctcccacaggtatgagccaccatgctcagctttattttgttttattttattttattttattttattttattttatttgagacagagtctcgctctgtcgcccaggctggagtccagtggagctatctcggctcactgcaacctctgcctctcaggttcaagcaattctcatgtctcagtctctcaagtagctgggattacaggtgtgtgccaccacgcccagataatttttttattattagttttagtagagtcggggttttgccatgttgcccagcctggtcttgtactcctgacctcaagatatccacccgcctcggcctcccaaagtgctgggattataggcatgagccaccatacccggcctctttttttaatttttatggatatgtggtaggtatatgtatttatgaggtacatgagatattttgatacaggcatacaatgcatcataatcacatcagagtaaatggggtatccatcatctcaaacatttatcatttctttgttacaaacattccaattatgctcttctagttatttttaattgcataataaattattgttgactgcccaggcacagtggctcacgcctgtaatcccagcactttgggaggccgaggcaggtggattgcctgaagtcaggagttcaagaccagcctgaacaacatggagaaatcccgtctctactaaaaatacaaaattagccaggtgcagtggcgcatgcctgtaatcccagctacttgggaggatgaggtaggagaatctcttgaacccaggagacagaggttgcggtgagccgagatcgcaccattgcattccagcctgggcgacattttgtatgacattgcttaaccataaactcttcatttgcttttgtttttcttttctttttttttgagacggagtctcgctctgttgcccacgggttccaccgtgttagccaggatggtctcgatctcttgaccttgtgatccgccagcctcggcctcccaaagtgctgggattacaggtatgagccaccacccacggcctgtttttcattttattgtctgagaatcccttgcagcctgggggcatagattcggggaattctcccactcctcactttcttttcttccttaggaatatcttggccaggtgcagtggcttacacctgaaatcccagaactttggcaagctaaggcaggaggaatgcttgaggtcaggagtttgagacccgcctggggaacaaagtgagatcctatctctatttaaaaaataagaataatggccagtcttgggggatcactcctgtaatcccagaactttggaaggcagaggtgggaggatcacttgaacccacaaggttgaggctgcagtgagacgagattgttctgccacactccagcctgggtggcagagtgagaccctgtctcaaaacaacaacaacaattaaaaaaaaaaaaaaaagaatatctttatttctgacttgggggcttgcaggtggctgaactatttctgtggaatgatctggaaacccacacatatgtgaagccaggtcagggctttgaattctttgaattatcaggctgaggcaggcaagtttgtcactcctcaaggtagatgaactcatgatctccagtctaccctttcacagactgtgtggcttttcaaggatcacatttcaaagggatctcaggcacaatttccatttgaactgggtccagatacaatttccatttgaactggacctcaatgtagtagtctctcattgtttgaagtatcactcggagttctttgtctcacaaccatgaaaattaaggagcatgggcaccaaggatgaggctggagtgaaagtttaataagctaaagaagaaagctctctgccgtggagagggggtctgaaagaggccattattatttatttatttatttgagacagagtttcactcttgttgcccaggctggagtgcaatggcatgatctcggctcaccacaacctccacctcccgggttcaagtgattctcctgcctcagcctcctgagtagctgggattataggcatgcaccaccacacccagttaattttgtattttcagtagagacggggtttctccatgttggtcaggctagtgtcgaactctcctcaggagatccacccacctcggcctcccaaagtactgggattacaggcatgagccaccgtgcccagccaaaagaggccatttttacagttgaatgcaaaagcttttataagaaaccaatgagggctgggcatttcatttacataaggtgtgaatttctcctatctccaccccatccttctaatgcgcatgggggcccttagcttaatttactccatattgctttaatttttttttaaattagccatattttgcaaaaaaaaaaaaaaaagtgcatacatcctataatgtcctattttatctagtaactctagcctagggcctcatctcctgacctgacacgggcattaaagcaagctcctggccactgaccctcagtgaccattcagagcagagacgtgatcaattcattgcctatcatctgtggcgtttagtttcctctttgtttctggattcctaggatttccctttctttcatgggagctcaactgggcattgaaaataattttttttaattgtattaaacatttcaaagagtttcaataggaaggttttctggttctccctgcctggcaaatcagaaacatatggagaggtttttcagtacatgtttcatagcccttctttctctgccaaaattctgatatagccccctggagaacaacaaaatctggatggagtttgggccagaattggggtggggtatagattggctcctatgtgcttggaaaataactcacaacccactttcccagtgttgattcaattctttgtgtcttagacattttttctcattttgttttgtttgagacagggtctcgctctgtcacccaggctggagtacagtggcacaatcttagctcactgtagtcttggcacccccgggctcaagccatcctcctgcctcagcctcccacatagctgggactacagatgcgcaccaccatgcccggctaagtcttttttttttttttttttttttttgagacggagtctcgctctgtcacccaggctggagtgcagtggcgtgatctcggctcactgcaagctccgcctcccaggttcacgccattctcctgcctcagcctccagagtagctgctgggactacaggtgcccactaccacacccgactaattttttgtatttttagtagagatggggtttcaccatgttggccaggatggtctcgatctcttgacctcgtgatccacccgcctcggcctcccaaagtgctgggattacaggcgtgagccaccacgcccggccaattttttgtatttttagtacagacagggtttcaccatgttagccaggttggtcttgatctcccgaccttgtgatccgcccgtcttggcctcccaaagtgctgggattacaggtgtgagccagcacgcccggccctggctaagtcttagacttttgtttccccaacgtctaacacagtttcatggcccatagaagatactgagtgcatgaatgaggaatgcacgaatgactcttggcagacacttcgtggtcagcataaaagagggagaaagctggctgggcaaagtggctcacacctgcaatcccagcactttgggaggccgaggccagtggatc

SEQ ID NO: 293 - DNA, 1356 bp, Homo sapiens
ttctcccgcaaccttcccttcgctccctcccgtcccccccagctcctagcctccgactccctccccccctcacgcccgccctctcgccttcgccgaaccaaagtggattaattacacgctttctgtttctctccgtgctgttctctcccgctgtgcgcctgcccgcctctcgctgtcctctctccccctcgccctctcttcggcccccccctttcacgttcactctgtctctcccactatctctgcccccctctatccttgatacaacagctgacctcatttcccgataccttttcccccccgaaaagtacaacatctggcccgccccagcccgaagacagcccgtcctccctggacaatcagacgaattctccccccccccccaaaaaaaaaagccatccccccgctctgccccgtcgcacattcggcccccgcgactcggccagagcggcgctggcagaggagtgtccggcaggagggccaacgcccgctgttcggtttgcgacacgcagcagggaggtgggcggcagcgtcgccggcttccagacaccaatgggaatcccaatggggaagtcgatgctggtgcttctcaccttcttggccttcgcctcgtgctgcattgctgcttaccgccccagtgagaccctgtgcggcggggagctggtggacaccctccagttcgtctgtggggaccgcggcttctacttcagcaggcccgcaagccgtgtgagccgtcgcagccgtggcatcgttgaggagtgctgtttccgcagctgtgacctggccctcctggagacgtactgtgctacccccgccaagtccgagagggacgtgtcgacccctccgaccgtgcttccggacaacttccccagataccccgtgggcaagttcttccaatatgacacctggaagcagtccacccagcgcctgcgcaggggcctgcctgccctcctgcgtgcccgccggggtcacgtgctcgccaaggagctcgaggcgttcagggaggccaaacgtcaccgtcccctgattgctctacccacccaagaccccgcccacgggggcgcccccccagagatggccagcaatcggaagtgagcaaaactgccgcaagtctgcagcccggcgccaccatcctgcagcctcctcctgaccacggacgtttccatcaggttccatcccgaaaatctctcggttccacgtccccctggggcttctcctgacccagtccccgtgccccgcctccccgaaacaggctactctcctcggccccctccatcgggctgaggaagcacagcagcatcttcaaacatgtacaaaatcgattggctttaaacacccttcacataccctcccccc

SEQ ID NO: 294 - DNA, 3587 bp, Homo sapiens
ctaagctggggtccatggagcctgcacccgcccgatctccgaggccccagcaggaccccgcccggccccaggagcccaccatgcctccccccgagaccccctctgaaggccgccagcccagccccagccccagccctacagagcgagcccccgcttcggaggaggagttccagtttctgcgctgccagcaatgccaggcggaagccaagtgcccgaagctgctgccttgtctgcacacgctgtgctcaggatgcctggaggcgtcgggcatgcagtgccccatctgccaggcgccctggcccctaggtgcagacacacccgccctggataacgtctttttcgagagtctgcagcggcgcctgtcggtgtaccggcagattgtggatgcgcaggctgtgtgcacccgctgcaaagagtcggccgacttctggtgctttgagtgcgagcagctcctctgcgccaagtgcttcgaggcacaccagtggttcctcaagcacgaggcccggcccctagcagagctgcgcaaccagtcggtgcgtgagttcctggacggcacccgcaagaccaacaacatcttctgctccaaccccaaccaccgcacccctacgctgaccagcatctactgccgaggatgttccaagccgctgtgctgctcgtgcgcgctccttgacagcagccacagtgagctcaagtgcgacatcagcgcagagatccagcagcgacaggaggagctggacgccatgacgcaggcgctgcaggagcaggatagtgcctttggcgcggttcacgcgcagatgcacgcggccgtcggccagctgggccgcgcgcgtgccgagaccgaggagctgatccgcgagcgcgtgcgccaggtggtagctcacgtgcgggctcaggagcgcgagctgctggaggctgtggacgcgcggtaccagcgcgactacgaggagatggccagtcggctgggccgcctggatgctgtgctgcagcgcatccgcacgggcagcgcgctggtgcagaggatgaagtgctacgcctcggaccaggaggtgctggacatgcacggtttcctgcgccaggcgctctgccgcctgcgccaggaggagccccagagcctgcaagctgccgtgcgcaccgatggcttcgacgagttcaaggtgcgcctgcaggacctcagctcttgcatcacccaggggaaagatgcagctgtatccaagaaagccagcccagaggctgccagcactcccagggaccctattgacgttgacctggccgaggaggcagagagagtgaaggcccaggttcaggccctggggctggctgaagcccagcctatggctgtggtacagtcagtgcccggggcacaccccgtgccagtgtacgccttctccatcaaaggcccttcctatggagaggatgtctccaatacaacgacagcccagaagaggaagtgcagccagacccagtgccccaggaaggtcatcaagatggagtctgaggaggggaaggaggcaaggttggctcggagctccccggagcagcccaggcccagcacctccaaggcagtctcaccaccccacctggatggaccgcctagccccaggagccccgtcataggaagtgaggtcttcctgcccaacagcaaccacgtggccagtggcgccggggaggcagaggaacgcgttgtggtgatcagcagctcggaagactcagatgccgaaaactcggtgagtggcccagaagttcagcccaggactcctgcctccccccatttcaggtcccagggggcacagccacagcaggtgactctcagacttgccttgcgcctggggaattttccagtgaggcattgagtcccaagctgtgctgaggacagtctccaaatgacagctgcatgcctggaccaccccagccctcccactacaccagggccaggagctcttctgaaatgctgatagcatgtgtccagagcactgtctcttttctggaatgtccaagacctttgtctggagcttccttatgcattttctgtcctctaagtcctcagtgaggagggctggacaagaatccattccttggtttattacagccagtgggggccagtgaaggggtgtcaggccacagggcagctatataggggccaaacaagtgaggtttgactccatccatgtagaaagatatataaatccattccacagtgaaacaggtggcctcgtgggtagtgacccttctgtccctagaggtttattactagaggctggactatcacctgtccaggggaaaaggggatctgaatagagtgaaaggttggactgggtggcccctgaggtctcttccagccctcagtctgaggttctgtattggaaagtgcatggaacccatggagaccgccgagccacagtcctcgccagcccactcctcgccagcccactcctcgccagtccagtctctgctgagagcacaaggagcctccagcctgccctgtggcacataccaccccccagcttggcctccccaccagcccgctgagcaggctgccacccccgatgctgagcctcacagcgagcctcctgatcaccaggagcgccctgccgtccaccgtgggatccgctacctgttgtacagagcacagagagccatccgccttcgccatgccctccgcttgcaccctcaattgcatcgggcccctattcggacttggtctccccatgtggtccaagccagcactcctgccatcacagggcccctcaaccatcctgccaatgcccaggaacatcctgcccagctgcaaaggggcatcagcccaccccaccggatacgaggggctgtgcgatcccgcagccgctccctccggggctcctcccatttatcccagtggctcaacaacttttttgccctccccttctcctccatggcttcccagcttgacatgtcttccgtggtgggggcaggggaaggcagagcccagactcttggagcagttgttccccctggggactctgtcagaggctccatggaggcctctcaagtccaagtgcctctggaagcctctccaattacattcccaccaccctgtgccccagaaaggccccccatcagcccagtcccaggcgcccgtcaagcaggcctctgagagtgctacccttctcttgtaaccttgcagccaacacccctgcccggcccctgagctgcctcctccagcccatgctcttacaggccctgcacagagtagcactcattaattcttggttaaggaatgaatcaacgaatgaatggctatgcatggacctctgggcagggagacctgggtcttctctggctgagaggggaaggctaaggcatggctgagattcaagccaccattccaggcctctttgcccaagaaagaaacttctgtcacccttgcactctcctgtgttctgagtccctggccaatagcacagccttccatgccccgacccccaccccaagcctctccactaggcctctgccaggatctaagcccatgagcacagggactggctatcccaagacctggcagatgtggctgctcaataaacacttgttgaaccatcaaaaaaaaaaaaaaa

SEQ ID NO: 295 - DNA, 4068 bp, Homo sapiens
aacagacacagactcgcaggccctcttcattctaaagcaagggtccaaaaccttttttctataaagggccagagagtaaataatttaggctttgtgagccaggcagtctgttgcagctacgcagtccttggttattatagtgcaaaaacagccataggcagcatgtacagaaatgagcataaccatgctccaacaaaactttatttacaggcactaatgtttaaatttcaggtaattttcacatgtcacaaaatatcacttttctttaaccacttaaaagtataaaagccattcttagtttgcaggcagtacagaaacagtttcagcccatgggctgtcatttgttgacccctattcaagagggtctgtcacagaagactcctgcttgcctgaaatttacgagtgcatgtaaatgttggaattaacaggtgtgcctgttttctcttatgctgtctttcatcttcaggaacagccaggaagacgctgcacttcgagatttccaaggaaggcagtgacctgtcagtggtggagcgtgcagaagtctggctcttcctaaaagtccccaaggccaacaggaccaggaccaaagtcaccatccgcctcttccagcagcagaagcacccgcagggcagcttggacacaggggaagaggccgaggaagtgggcttaaagggggagaggagtgaactgttgctctctgaaaaagtagtagacgctcggaagagcacctggcatgtcttccctgtctccagcagcatccagcggttgctggaccagggcaagagctccctggacgttcggattgcctgtgagcagtgccaggagagtggcgccagcttggttctcctgggcaagaagaagaagaaagaagaggagggggaagggaaaaagaagggcggaggtgaaggtggggcaggagcagatgaggaaaaggagcagtcgcacagacctttcctcatgctgcaggcccggcagtctgaagaccaccctcatcgccggcgtcggcggggcttggagtgtgatggcaaggtcaacatctgctgtaagaaacagttctttgtcagtttcaaggacatcggctggaatgactggatcattgctccctctggctatcatgccaactactgcgagggtgagtgcccgagccatatagcaggcacgtccgggtcctcactgtccttccactcaacagtcatcaaccactaccgcatgcggggccatagcccctttgccaacctcaaatcgtgctgtgtgcccaccaagctgagacccatgtccatgttgtactatgatgatggtcaaaacatcatcaaaaaggacattcagaacatgatcgtggaggagtgtgggtgctcatagagttgcccagcccagggggaaagggagcaagagttgtccagagaagacagtggcaaaatgaagaaatttttaaggtttctgagttaaccagaaaaatagaaattaaaaacaaaacaaaaaaaaaaacaaaaaaaaacaaaagtaaattaaaaacaaaacctgatgaaacagatgaaggaagatgtggaaaaaatccttagccagggctcagagatgaagcagtgaaagagacaggaattgggagggaaagggagaatggtgtaccctttatttcttctgaaatcacactgatgacatcagttgtttaaacggggtattgtcctttccccccttgaggttcccttgtgagccttgaatcaaccaatctagtctgcagtagtgtggactagaacaacccaaatagcatctagaaagccatgagtttgaaagggcccatcacaggcactttcctacccaattacccaggtcataaggtatgtctgtgtgacacttatctctgtgtatatcagcatacacacacacacacacacacacacacacaggcatttccacacattacatatatacacatactggtaaaagaacaatcgtgtgcaggtggtcacacttcctttttctgtaccacttttgcaacaaaacaaaacaaacaacattaaaaaattgagaacaagtatggaaagaatgaaagatcaaggaaaaaagaataccaagttacatttcgttaaggtgcttatgatcttagaactatgcaacctaataggtttgaaactgtttacctgagagagaacaaaaagagagacttttttgtattggaagtaatctgattaatttttattttcttcaaggagagatacttgaaaggaatatgtttgtccatctgttggatccaaacatttctatattttgtaaatgttgttgttgttttttttttaatcgtttactatttgcactacaatggtgtttgacctgtctaatccttatttaacaagtattttctttggttgggggtgggggtggggtttaagagctgcacttaatgtgagctataaaagaactgctacagcacacaaaatagctatttttattattataattataattattattattattttgtaccttaaaaaatagacacatacaccaaagacatttgtgtgagcctttaaacagtctgtctgtggttggtatcattcaccatcaatgagtcaggggttgggattcaaggttgagtagtgtggattgtgttcaggcttaaaagacctgagaagtttggtttttgactccttttacatccatgaaacaggacatttcatactggatgtacagtagttgtacactgttggatatcaagttcaatcaaattcatggaactacatgcttgtatgtgtatatatacattgcttgtgcatatgcatatctgtatgtatatatacatgtattgtaccatgtccatacacattttaagcacttcaggctgtcattttttaatgttcttaaagcaatgaatgtttgtgtgcaaaacacagtatttttaagaaggataggctatagtttttgcttttactctgaactaggtgggcgcatttcaaaaattcggatgggaaaaagcctggaaattccagtgaatattcagcaaggccctctttcattgtacagggatcaaatttcctcctcttttttgtgccccctcccacttctacaagttatcccctgtggggaaaacaggatgataatcaaaactctgggctgatgtttttccaacttagtgtctattggaatcaatcttaaatcagaagctttttcagaaaaataatatttaggccagaattagagttgagtgtattttttaaaaatgattaaggcttggttgtgagaaatattacctgtaccagctgggaaaaataatgtcatcactaactaaaagataattaatttgagagaaagtgttaagagagggagagtaaggaagagaacagttaagaggaggcagaggtgagggcagtagtaaaaatctctaaaattttaatttacagccaaaattcttcatgtgtaaatttgtattgattcagatgcagaaatgaaaaaaaaacacctttgttttataaatatcaaagtacatgcttaaagccaagtttttatctagtttattctagtacttagcttgcctggaatagctaataaattattcatgtatgtgcttttgaaaatccagagccctatttttacacacttgtgtgaagttggcaaacattttgaaaaatggaaaaaagtttctaataattgggaacaattacattaattaatattttgtaaaatattgaagcttttagccctatgtcaatttgtagattaaaataaattaattataggaaaggaagataacagtgagaaaccaaacattacaaaaggtggtttagctctccttgaaaaatatactaagttggtatactataacacttggctatatgtaggcaatgtcactactgggcaaatacacttactgtgttctagaggcagccctttcttatgcagaaaatacaatacgcactgcatgagaagcttgagagtggattctaatccaggtctgtcgaccttggatatcatgcatgtgggaaggtgggtgtggtgagaaaagttttaaggcaagagtagatggccatgttcaactttacaaaatttcttggaaaactggcagtattttgaactgca

SEQ ID NO: 296 - DNA, 322 bp, Homo sapiens
aaatatcatatggaaaggcataagagaacccatagtggagaaaaaccttaccagtgtgaatactgtttacagtattttccagaacagatcgtgtattgaaacataaacgtatgtgccatgaaaatcatgacaaaaaactaaatagatgtgccatcaaaggtggccttctgacatctgaggaagattctggcttttctacatcaccaaaagacaactcactgccaaaaaagaaaaggcagaaaacggagaaaaaatcatctggaatggacaaagagagtgctttggacaaatctgacctgaaaaaaaaaaaaaaaaactttag

SEQ ID NO: 297 - DNA, 736 bp, Homo sapiens
ggctctcaccctcctctcctgcagctccagctctgtgctctgcctctgaggagaccatggcccggcctctgtgtaccctgctactcctgatggctaccctggctggggctctggcctcgagctccaaggaggagaataggataatcccaggtggcatctatgatgcagacctcaatgatgagtgggtacagcgtgcccttcacttcgccatcagcgagtacaacaaggccaccgaagatgagtactacagacgcccgctgcaggtgctgcgagccagggagcagacctttgggggggtgaattacttcttcgacgtagaggtgggccgcaccatatgtaccaagtcccagcccaacttggacacctgtgccttccatgaacagccagaactgcagaagaaacagttatgctctttcgagatctacgaagttccctgggaggacagaatgtccctggtgaattccaggtgtcaagaagcctaggggtctgtgccaggccagtcacaccgaccaccacccactcccaccccctgtagtgctcccacccctggactggtggcccccaccctgcgggaggcctccccatgtgcctgtgccaagagacagacagagaaggctgcaggagtcctttgttgctcagcagggcgctctgccctccctccttccttcttgcttctaatagacctggtacatggtacacacacccccacctcctgcaattaaacagtagcatcgcc

SEQ ID NO: 298 - DNA, 565 bp, Homo sapiens
aattcgctcggctttgacagagtgcaagacgatgacttgcaaaatgtcgcagctggaacgcaacatagagaccatcatcaacaccttccaccaatactctgtgaagctggggcacccagacaccctgaaccagggggaattcaaagagctggtgcgaaaagatctgcaaaattttctcaagaaggagaataagaatgaaaaggtcatagaacacatcatggaggacctggacacaaatgcagacaagcagctgagcttcgaggagttcatcatgctgatggcgaggctaacctgggcctcccacgagaagatgcacgagggtgacgagggccctggccaccaccataagccaggcctcggggagggcaccccctaagaccacagtggccaagatcacagtggccacggccatggccacagtcatggtggccacggccacaggccactaatcaggaggccaggccaccctgcctctacccaaccagggccccggggcctgttatgtcaaactgtcttggctgtggggctaggggctggggccaaataaagtctcttcctccaagct

SEQ ID NO: 299 - DNA, 2155 bp, Homo sapiens
gtcacatggggtgcgcgcccagactccgacccggaggcggaaccggcagtgcagcccgaagccccgcagtccccgagcacgcgtggccatgcgtcccctgcgcccccgcgccgcgctgctggcgctcctggcctcgctcctggccgcgcccccggtggccccggccgaggccccgcacctggtgcaggtggacgcggcccgcgcgctgtggcccctgcggcgcttctggaggagcacaggcttctgccccccgctgccacacagccaggctgaccagtacgtcctcagctgggaccagcagctcaacctcgcctatgtgggcgccgtccctcaccgcggcatcaagcaggtccggacccactggctgctggagcttgtcaccaccagggggtccactggacggggcctgagctacaacttcacccacctggacgggtacttggaccttctcagggagaaccagctcctcccagggtttgagctgatgggcagcgcctcgggccacttcactgactttgaggacaagcagcaggtgtttgagtggaaggacttggtctccagcctggccaggagatacatcggtaggtacggactggcgcatgtttccaagtggaacttcgagacgtggaatgagccagaccaccacgactttgacaacgtctccatgaccatgcaaggcttcctgaactactacgatgcctgctcggagggtctgcgcgccgccagccccgccctgcggctgggaggccccggcgactccttccacaccccaccgcgatccccgctgagctggggcctcctgcgccactgccacgacggtaccaacttcttcactggggaggcgggcgtgcggctggactacatctccctccacaggaagggtgcgcgcagctccatctccatcctggagcaggagaaggtcgtcgcgcagcagatccggcagctcttccccaagttcgcggacacccccatttacaacgacgaggcggacccgctggtgggctggtccctgccacagccgtggagggcggacgtgacctacgcggccatggtggtgaaggtcatcgcgcagcatcagaacctgctactggccaacaccacctccgccttcccctacgcgctcctgagcaacgacaatgccttcctgagctaccacccgcaccccttcgcgcagcgcacgctcaccgcgcgcttccaggtcaacaacacccgcccgccgcacgtgcagctgttgcgcaagccggtgctcacggccatggggctgctggcgctgctggatgaggagcagctctgggccgaagtgtcgcaggccgggaccgtcctggacagcaaccacacggtgggcgtcctggccagcgcccaccgcccccagggcccggccgacgcctggcgcgccgcggtgctgatctacgcgagcgacgacacccgcgcccaccccaaccgcagcgtcgcggtgaccctgcggctgcgcggggtgccccccggcccgggcctggtctacgtcacgcgctacctggacaacgggctctgcagccccgacggcgagtggcggcgcctgggccggcccgtcttccccacggcagagcagttccggcgcatgcgcgcggctgaggacccggtggccgcggcgccccgccccttacccgccggcggccgcctgaccctgcgccccgcgctgcggctgccgtcgcttttgctggtgcacgtgtgtgcgcgccccgagaagccgcccgggcaggtcacgcggctccgcgccctgcccctgacccaagggcagctggttctggtctggtcggatgaacacgtgggctccaagtgcctgtggacatacgagatccagttctctcaggacggtaaggcgtacaccccggtcagcaggaagccatcgaccttcaacctctttgtgttcagcccagacacaggtgctgtctctggctcctaccgagttcgagccctggactactgggcccgaccaggccccttctcggaccctgtgccgtacctggaggtccctgtgccaagagggcccccatccccgggcaatccatgagcctgtgctgagccccagtgggttgcacctccaccggcagtcagcgagctggggctgcactgtgcccatgctgccctcccatcaccccctttgcaatatattttt

SEQ ID NO: 300 - DNA, 1759 bp, Homo sapiens
gacccaatccaggccagagtctttctctcaggggcttcctcgtgctcagctaatcctccgatcaatccttgggaatccctgggacctcttcggtatccctactctcagccagggatcatgtcttgggccgctcgcccgcccttcctccctcagcggcatgccgcagggcagtgtgggccggtgggggtgcgaaaagaaatgcattgtggggtcgcgtcccggtggcggcggcgacggccctggctggatcccgcagcggcggcggcggcggcggtggcaggcggagaacaacaaaccccggagccggagccaggggaggctggacgggacgggatgggcgacagcgggcgggactcccgaagcccagacagctcctccccaaatccccttccccagggagtccctcccccttctcctcctgggccacccctacccccttcaacagctcctacccttggaggctctggggccccacccccacccccgatgccaccacccccactgggctctccctttccagtcatcagttcttccatggggtcccctggtctgccccctccagctcccccaggattctccgggcctgtcagcagcccccagattaactcaacagtgtcactccctgggggtgggtctggcccccctgaagatgtgaagccaccagtcttaggggtccggggcctgcactgtccaccccctccaggtggccctggggctggcaaacggctatgtgcaatctgcggggacagaagctcaggcaaacactacggggtttacagctgtgagggttgcaagggcttcttcaaacgcaccatccgcaaagaccttacatactcttgccgggacaacaaagactgcacagtggacaagcgccagcggaaccgctgtcagtactgccgctatcagaagtgcctggccactggcatgaagagggaggcggtacaggaggagcgtcagcggggaaaggacaaggatggggatggggagggggctgggggagcccccgaggagatgcctgtggacaggatcctggaggcagagcttgctgtggaacagaagagtgaccagggcgttgagggtcctgggggaaccgggggtagcggcagcagcccaaatgaccctgtgactaacatctgtcaggcagctgacaaacagctattcacgcttgttgagtgggcgaagaggatcccacacttttcctccttgcctctggatgatcaggtcatattgctgcgggcaggctggaatgaactcctcattgcctccttttcacaccgatccattgatgttcgagatggcatcctccttgccacaggtcttcacgtgcaccgcaactcagcccattcagcaggagtaggagccatctttgatcgggtgctgacagagctagtgtccaaaatgcgtgacatgaggatggacaagacagagcttggctgcctgagggcaatcattctgtttaatccagatgccaagggcctctccaaccctagtgaggtggaggtcctgcgggagaaagtgtatgcatcactggagacctactgcaaacagaagtaccctgagcagcagggacggtttgccaagctgctgctacgtcttcctgccctccggtccattggccttaagtgtctagagcatctgtttttcttcaagctcattggtgacacccccatcgacaccttcctcatggagatgcttgaggctccccatcaactggcctgagctcagacccagacgtggtgcttctccacactggaggagc

SEQ ID NO: 301 - DNA, 1220 bp, Homo sapiens
gaattcgttctttcactctttgcaataaatcttgctactgttcactctttgggtccacactgcttttatgagctataacactcaccgcaaaggtctgcagcttcactcctgaagccagcgagaccacaagcccactgggaggaacgaacaactccaggcgcgcaatgaacaactccaggcgcgccgccttaagagctgtaacatcaccgcgaaggtctgcagtttcactcctaagccagcgagaccacgaacccaccagaaggaagaaactccaaacacatctgaacattagaaggaacaaactccagatgcgcacctttaagagcttgtaacactcaccgcgagggtccacggcttcattcttgaagtcaagtgatgaaggatgcaagaacccaccaattccggacacattttgtcgaccatgaaggactttcgcctattgccaagcggtgagacaatcgctgagcagtgagaccatcacctattgccgagcggtgagaccattgcctatcgccaagcaaatcgaggccatcaagctacagatggtcttacaaatggaaccccaaatgagttcaactaacaacttctaccgaggacccctggactgaccagctggtcctggcacttcccctggcctagagagttcccctctgaaggacactacaactgcaaagccccttcttcgcccctatccagcaggaagtagctagagcagtcatcggccaaattcccaacagcagttggggtgtcctgttgattgaggggtgacagcatgctggcagtcctcacagccctcactcgctcgctcactctcggcacctcctctgcctgggctcccactttggcagcacttgaggagcccttcagctctgtatctagctactctgatgggtccttggagaacctttatgtctagctcagggattgtaatacaccatcagcaccctgtgtctagctcaggtttgtgaatgcaccaatggacactctgtatctagctactctggtggggccttggagaaccttgtgtcaacactctgtatctaactaacctggtggggatgtggagaaccttgtgtctagctcagggatgtaaacgcaccaatcagtgccctgtcaaaccactcggctctaccaatcagcaggatgtgggtggggccagataagagaataaaagcaggctgcccgagccagcagtggcgaaaaaaaaaaaaaaggaattc

SEQ ID NO: 302 - DNA, 3345 bp, Homo sapiens
gaattccgtctcgaccactgaatggaagaaaaggacttttaaccaccattttgtgacttacagaaaggaatttgaataaagaaaactatgatacttcaggcccatcttcactccctgtgtcttcttatgctttatttggcaactggatatggccaagaggggaagtttagtggacccctgaaacccatgacattttctatttatgaaggccaagaaccgagtcaaattatattccagtttaaggccaatcctcctgctgtgacttttgaactaactggggagacagacaacatatttgtgatagaacgggagggacttctgtattacaacagagccttggacagggaaacaagatctactcacaatctccaggttgcagccctggacgctaatggaattatagtggagggtccagtccctatcaccatagaagtgaaggacatcaacgacaatcgacccacgtttctccagtcaaagtacgaaggctcagtaaggcagaactctcgcccaggaaagcccttcttgtatgtcaatgccacagacctggatgatccggccactcccaatggccagctttattaccagattgtcatccagcttcccatgatcaacaatgtcatgtactttcagatcaacaacaaaacgggagccatctctcttacccgagagggatctcaggaattgaatcctgctaagaatccttcctataatctggtgatctcagtgaaggacatgggaggccagagtgagaattccttcagtgataccacatctgtggatatcatagtgacagagaatatttggaaagcaccaaaacctgtggagatggtggaaaactcaactgatcctcaccccatcaaaatcactcaggtgcggtggaatgatcccggtgcacaatattccttagttgacaaagagaagctgccaagattcccattttcaattgaccaggaaggagatatttacgtgactcagcccttggaccgagaagaaaaggatgcatatgttttttatgcagttgcaaaggatgagtacggaaaaccactttcatatccgctggaaattcatgtaaaagttaaagatattaatgataatccacctacatgtccgtcaccagtaaccgtatttgaggtccaggagaatgaacgactgggtaacagtatcgggacccttactgcacatgacagggatgaagaaaatactgccaacagttttctaaactacaggattgtggagcaaactcccaaacttcccatggatggactcttcctaatccaaacctatgctggaatgttacagttagctaaacagtccttgaagaagcaagatactcctcagtacaacttaacgatagaggtgtctgacaaagatttcaagaccctttgttttgtgcaaatcaacgttattgatatcaatgatcagatccccatctttgaaaaatcagattatggaaacctgactcttgctgaagacacaaacattgggtccaccatcttaaccatccaggccactgatgctgatgagccatttactgggagttctaaaattctgtatcatatcataaagggagacagtgagggacgcctgggggttgacacagatccccataccaacaccggatatgtcataattaaaaagcctcttgattttgaaacagcagctgtttccaacattgtgttcaaagcagaaaatcctgagcctctagtgtttggtgtgaagtacaatgcaagttcttttgccaagttcacgcttattgtgacagatgtgaatgaagcacctcaattttcccaacacgtattccaagcgaaagtcagtgaggatgtagctataggcactaaagtgggcaatgtgactgccaaggatccagaaggtctggacataagctattcactgaggggagacacaagaggttggcttaaaattgaccacgtgactggtgagatctttagtgtggctccattggacagagaagccggaagtccatatcgggtacaagtggtggccacagaagtaggggggtcttccttaagctctgtgtcagagttccacctgatccttatggatgtgaatgacaaccctcccaggctagccaaggactacacgggcttgttcttctgccatcccctcagtgcacctggaagtctcattttcgaggctactgatgatgatcagcacttatttcggggtccccattttacattttccctcggcagtggaagcttacaaaacgactgggaagtttccaaaatcaatggtactcatgcccgactgtctaccaggcacacagactttgaggagagggcgtatgtcgtcttgatccgcatcaatgatgggggtcggccacccttggaaggcattgtttctttaccagttacattctgcagttgtgtggaaggaagttgtttccggccagcaggtcaccagactgggatacccactgtgggcatggcagttggtatactgctgaccacccttctggtgattggtataattttagcagttgtgtttatccgcataaagaaggataaaggcaaagataatgttgaaagtgctcaagcatctgaagtcaaacctctgagaagctgaatttgaaaaggaatgtttgaatttatatagcaagtgctatttcagcaacaaccatctcatcctattacttttcatctaacgtgcattataattttttaaacagatattccctcttgtcctttaatatttgctaaatatttcttttttgaggtggagtcttgctctgtcgcccaggctggagtacagtggtgtgatcccagctcactgcaacctccgcctcctgggttcacatgattctcctgcctcagcttcctaagtagctgggtttacaggcacccaccaccatgcccagctaatttttgtatttttaatagagacggggtttcgccatttggccaggctggtcttgaactcctgacgtcaagtgatctgcctgccttggtctcccaatacaggcatgaaccactgcacccacctacttagatatttcatgtgctatagacattagagagatttttcatttttccatgacatttttcctctctgcaaatggcttagctacttgtgtttttcccttttggggcaagacagactcattaaatattctgtacattttttctttatcaaggagatatatcagtgttgtctcatagaactgcctggattccatttatgttttttctgattccatcctgtgtccccttcatccttgactcctttggtatttcactgaatttcaaacatttgtcagagaagaaaaaagtgaggactcaggaaaaataaataaataaaagaacagccttttgcggccgcgaattc

SEQ ID NO: 303 - DNA, 2846 bp, Homo sapiens
gaattcggggcgctacggcggacccggctgggcagttccttccccagaaggagagattcctctgccatggagtcctacgatgtgatcgccaaccagcctgtcgtgatcgacaacggatccggtgtgattaaagctggttttgctggtgatcagatccccaaatactgctttccaaactatgtgggccgacccaagcacgttcgtgtcatggcaggagcccttgaaggcgacatcttcattggccccaaagctgaggagcaccgagggctgctttcaatccgctatcccatggagcatggcatcgtcaaggattggaacgacatggaacgcatttggcaatatgtctattctaaggaccagctgcagactttctcagaggagcatcctgtgctcctgactgaggcgcctttaaacccacgaaaaaaccgggaacgagctgccgaagttttcttcgagaccttcaatgtgcccgctcttttcatctccatgcaagctgtactcagcctttacgctacaggcaggaccacaggggtggtgctggattctggggatggagtcacccatgctgtgcccatctatgagggctttgccatgccccactccatcatgcgcatcgacatcgcgggccgggacgtctctcgcttcctgcgcctctacctgcgtaaggagggctacgacttccactcatcctctgagtttgagattgtcaaggccataaaagaaagagcctgttacctatccataaacccccaaaaggatgagacgctagagacagagaaagctcagtactacctgcctgatggcagcaccattgagattggtccttcccgattccgggcccctgagttgctcttcaggccagatttgattggagaggagagtgaaggcatccacgaggtcctggtgttcgccattcagaagtcagacatggacctgcggcgcacgcttttctctaacattgtcctctcaggaggctctaccctgttcaaaggttttggtgacaggctcctgagtgaagtgaagaaactagctccaaaagatgtgaagatcaggatatctgcacctcaggagagactgtattccacgtggattgggggctccatccttgcctccctggacacctttaagaagatgtgggtctccaaaaaggaatatgaggaagacggtgcccgatccatccacagaaaaaccttctaatgtcgggacatcatcttcacctctctctgaagttaactccactttaaaactcgctttcttgagtcggagtgtttgcgaggaactgcctgtgtgtgagtgcgtgtgtggatatgagtgtgtgcgcacatgcgagtgccgtgtggccctgggaccctgggcccagaaaggacgatgaactacccgcagtggtgatgcctgaggcctggggttgaccactaactggctcctgacagggaagagcgctggcagaggctgtgctccctcctcaggtggcctctggctggctgtgggggactccgtttactaccacagggagacagagggaggtaagccatcccccgggagaccttgctgctgaccatcctaggctgggctggcccaccctcacccccacccccagggtgccctgaggccccaggcagctgctgcctccactatcgatgcctcctgactgcacactgaggactgggactggggttgagttctgtctggttttgttgccattttggtttgggaggctggaaaagcaccccaagaagctattacagagactggagtcaggagagagcaggaggccctcatgttcaccagggaacaggaccacaccggccactgaaggagggcaggagcagtcctccctctgaatggctgcagagttaatgttcccagcccagtcccctttcgggggccttgggagagtttaaggcacctgctggttccaggacctcgctttccatctgttcttgttgcaatgccatcttcaaaccgttttatttattgaagtgtttgttcagttaggggctggagagagggagcttgctgcctcctgccttgctacactaatgtttacagcacctaagcttagcctccagggccccacctctcccagctgatggtgagctgacagtgtccacaggttccaggaccatttgagattggaagctacactcaaagacactcccaccaggctctttctcccttttcctcttctcactgccctggaatcaacaggctggttgctggttagattttctgaaacaggaggtaaaatttttctttggcagaggcccctaagcaagggaggggtgttggagagccagtgcccttaagactggagaaagctgcaatttaccaagttgccttttgccactgtagctgaccaggggactaggttgtagaggtgggaaggcccctctgggctgatcttgtgccattcttgaccttggacctgcttggttaaggagggagtgggccagaccagagtgccaggagctaatggagccaggcctgacacctaggagtggtccaaagccttcagcctagatggtgcaaagctggggccagcctgtcttcaccggcaccctcacctgtgacaccaagacccaccccaatccagacttcacacagtattctcccccacgccgtctatgaccaaaggcccctgccaggtgtgggtccacagcagcaggtatgtgtgaaagcaacgtagcgccccgcggactgcagtgcgcttaaccaactcacctcccttctcttagcccaagcctgtccctcgcacagcctcgcacaaaccacattgcctggtggggcccagtgtactgaaataaagtcgttccgatagacacgtcaaaaaaaaaaaacccgaattc

SEQ ID NO: 304 - DNA, 1579 bp, Homo sapiens
cagctgaggcgttctccgcttagtgcctacggcatgggtcagctctttctgccacctccgccttcgcggtcctcacctctttgcgggtgaagttaccttttgggtttccagaccttgggggcctgaggcaaactcggggacgaacccctaacccacctctcttttctgtcattctccaactcttactttgtaccacggaatcacttggccttaaagctagccagctcggccgtgccttgaggccaggttcgagagataaaggtaaccgtggggaaagcggccccccagtggacaaaggcggaggcaagaatagagcaggcctgagggccataggcgatgagaataggcagttgaggggtgaaaaagaaaacaaacaaacaacaacaacaaaccctgaagagtactgaagatttagaagggactggaaaggacttgttgcgcaatggaagaatctgactctgagaaaacgacggagaaagaaaatctggggccgagaatggatccaccactaggggaaccggaaggatcgcttgggtgggtgctaccaaatacagccatgaagaaaaaggtgctgttgatgggtaaaagtgggtctggtaagaccagcatgaggtctattatctttgcaaattatattgccagagacacacgtcgccttggcgcaacaatactagaccgtatacatagtcttcaaattaatagcagtttgagcacctactctctcgtagactctgttggaaatacaaagacatttgatgtagaacattctcatgttcgatttctgggaaacctggtattgaacctgtgggattgtggtgggcaagacaccttcatggaaaattatttcactagccaacgggacaacatcttccgaaatgtggaggttctgatttatgtctttgatgtggagagccgcgaactggaaaaggacatgcactattaccaatcatgcctggaggccattctgcagaattctccagatgccaaaatattttgcttggtacacaaaatggatctggtacaggaggatcaacgggacctgatttttaaagagcgagaagaagatttgaggcgtttgtctcgcccattggaatgttcttgtttccgaacatctatctgggatgaaaccctctataaggcttggtccagcatagtttatcagctgattcccaatgttcagcagctggaaatgaacctaaggaattttgctgaaattatcgaagctgatgaagtacttctttttgagagagctacttttctggtaatttctcactatcagtgtaaagagcagcgtgatgcccatagatttgagaaaataagcaacattattaagcagttcaagctgagctgcagcaagctggctgcctctttccagagtatggaagtcaggaactctaacttcgctgctttcattgacatctttacatccaacacttatgtgatggttgtagtgtctgatccgtccattccttctgcagctactctgatcaacatccgcaatgccaggaaacactttgaaaagctggaaagagtggatggaccaaagcagtgtcttctcatgcgctaaacattagtagta

SEQ ID NO: 305 - DNA, 946 bp, Homo sapiens
cttctgactgggctcaggctgacaggtagagctcaccatggcttcttgtgtccttgtcccctccccatcacagctgtggtgcagtccaccgtctccagtggctatggcggtgccagtggtgtcggcagtggcttaggcctgggtggaggaagcagctactcctatggcagtggtcttggcgttggaggtggcttcagttccagcagtggcagagccattgggggtggcctcagctctgttggaggcggcagttccaccatcaagtacaccaccacctcctcctccagcaggaagagctataagcactaaagtgcgtctgctagctctcggtcccacagtcctcaggcccctctctggctgcagagccctctcctcaggttgcctgtcctctcctggcctccagtctcccctgctgtcccaggtagagctggggatgaatgcttagtgccctcacttcttctctctctctctataccatctgagcacccattgctcaccatcagatcaacctctgattttacatcatgatgtaatcaccactggagcttcactgttactaaattattaatttcttgcctccagtgttctatctctgaggctgagcattataagaaaatgacctctgctccttttcattgcagaaaattgccaggggcttatttcagaacaacttccacttactttccactggctctcaaactctctaacttataagtgttgtgaacccccacccaggcagtatccatgaaagcacaagtgactagtcctatgatgtacaaagcctgtatctctgtgatgatttctgtgctcttcactgtttgcaattgctaaataaagcagatttataatacatatattcttttactttgccttgctttggggccaaagttttgggcttaaacttttttatctgataagtgaatagttgtttttaaaagataatcta

SEQ ID NO: 306 - DNA, 35641 bp, Homo sapiens
gatcaaacggacttaacacaaattcattatcttccagttctgggggtcggaagtccaaaatgggtggatagagctgcagtcctcccgggagccctaggggagaatccatttccttgcctttttcagcttgtaagggctgcattccttggttcagtgcccgttccacatcactctgaactcggcctcctgtcacatctctgaatctgaccctcctacctctctctttctcttataagcacatttgtgatacattgagcccacctggataatccatataatccccccatctcaagaaccttaacatactcacatctgcaaacccccctttgccacataaaacaacctacaggctccagggattaggatatgaacatctttgggaagccgatattctgcctaccaccgcttgggagtcaggtttgaatttcagctttgtcatttcaatcttcatttcctaaatatgtgttgagtacccccatatcacgtcctgaaatagatctaagaaatacactaactagctcccgtggccttgcccaagttatataacctccctgcacctccatttttctcactggcagaactgacgagattaatatctgcctcagaggaaacgctgtatgtaaagtgtctgccggcaaccctttccacttaaacagcattcaggaattatatgctattttcatcttgacaaaatgtaagcaaaataccagattaagcagtaaagaggtagaggaacagatcctcttggaaacggctagtgtgaatgtgaattggtataggctttctagagggcaatgtggcaatgtgaatggaatgaaaagccttacaaatttttttctctttatcccagtgattattcatttctagacgtgtatctgaaggccacggctgaatttacatacaaagatgtttagtgaaatattatttatattactggaagggaaaaagcagaaacagactaaatgtcctctaataagcaattaggtaagtacacccacataatggaaatctcatcagccatataaaaggactttgtaaaagaatatgaaacatcatgttcagaggtttgccaaatgttaatgacaaagctggggatttaaatcagggatattaattatctcgtgtcggtaaaagaactccgtgtgatgagagaatgtgtatatagatagaaaaaaaaggactaaataaaatagatttcgtgatgttaacagtggttatttccaagtaatggaaacaagtgattttcatttttgtttacttgtattttctattttctaataacaaaggtggggggtttctatacaaaacaattcctctactagttcaactatcaggcatttctaggtatagaacaaacactgcgggaggtgtccctctagtggaaggagggatttttaaaaatagtttattgtattgaagtctttgggaggcaaacagaggtctgaagtcagtaaatgattctgcttattccacagccactgcactccagcctgggcaacatatcaacatcctgtctcgggaaagaaaaaaaaaattaaaagaaggatggggagtaatcgcaaaaggaagggccaaaaaccaccctaggaaacaggtgctactaactcttggcgcatttggaatattgaccagtaactttttcaactgtcgatgtcgggggattaagctccttaggcttacttccccttcccttgctttttggcagcttgaggctagggtgccaggggatgtggaaactcaaaagagacgtgaatggagcctgatatctgcaagctacaccgacagggggcgccagcccctacaggtgactccatgaatcttcggctccactcggctcttcttcggctgagttcggccaacgcttgccttctcaggctcggctctcttcggctttctgagagcgcgcctgtcgtggcctcggctcctcttcggctgcgttcggcccacgatcatctcagtctcagctctcctcggctacgttcggctggctgccgtcctctcggactcggctctcttcggttgagttcggcctactctccactaggagtcggcttccttcggctgcgttcggctgcgacccggaagagcttccatggagtcagggcagccggctcgacggattgccatggcgccgctgctggagtacgagcgacagctggtgctggaactgctcgacactgacgggctagtagtgtgcgcccgcgggctcggcgcggaccggctcctctaccactttctccagctgcactgccacccagcctgcctggtgctggtgctcaacacgcagccggccgaggaggtgcggccgcgctggcgcgggagtgaggggactccgagagtgttgagggcctcctgagcggatgcgaggcctctgacagggatggaggggctctgagggggattcaggcccctgacactacgcgatgacacagagaaggatggcaggggtccccagggggatgcaggtccctcacactgcgggaacacagacgtatgtaaggggtcgctaggaggataccggtcgctcacaccgtgcggggacactgataagaattggaggggccccgagaaggctgcaggtccctggcaggagttgaagaacactaagaggaatgccagtccctgacactgtgcggggactctgagagggaagggaggggtcccaagaaggatgcaagtctttgaccagagttcaagaacactaagagaaatgggaggggtccccaggggatgcgggtccctgacactgtgcaggcacagtgagaatgatggaaggggtcccgagaaggatgcaattccctgacaacactaagagggatgggaggggtccccagaaggatgcaggtccctgacatgggtgcaagggcactgaaaggtgaaggggctctgagtggtaggagaggatcggaggtcgctgcaggggagggggagatgtcggaaggaggatctggataggaataacgggagagtcctgaagttggccattaagggagtttctgggggcagaaggaaggtccctgaaagggaacagtgatgaggatggaagatctctgagggtgatggggagacatgaaaggagatgctgaggcgctggaaaaaccccaatagggaaaaggagggaccaggaaataggacattcaccaaggctgtgttaagagggccatagggtcagaaagggattggagcttgacgctgaggatgttggcaaaggttaactacagttaaggacaatggagaacactgagaaagatggaatggggctacacatgggtctgaggggtgttgagaggggacacagcttggtcggacaagtctgatgatcccctagatatatcaggtggccgggagaaaaatgtcagctgagaagagtgaccacagtctctttgagggcagggatcctgtttgattcatctaggtatccccagtgcttggcatagggcctaaggcaacacacagggcctagtaaagatggttttaaactggggatataaataaaccaagccaagggacccagtgacatgaagtccctctaggatagattagcacagaactgatagtctaaaacattgtctggggaaaggattcccttgttatcatctcatagaatgtgcttggctacaaacctggctttggtgggaagtattttctaggtagcagaaatcttttaatccaggcttttaaaagtttgaggttttgtatgtgtgtgcatatgttattgtagttgagtgctgataatgactgaagtgcaattattccttagtgtaaaccccaaaacaagaaaacctcattaaatgtagactggttggctgaagttactataaagaagtaacttagtgtgtatattcattattaagttcattatctcagagaaagacagcacattattttaaatatctgtgacctattaaaaactgccctgtattaaatagcctactaatcaagtttgatttgatttaggagtattttatcaatcagctgaagatagaaggagttgaacacctccctcgccgtgtaacaaatgaaatcacaagcaacagtcgctatgaagtttacacacaaggtggtgttatatttgcgacaagtaggatacttgtggttgacttcttgactgatagaataccttcagatttaattactggtaagaatttgaaatcttattattagtatgtaaatttgtacttttttttttttaagtacaatttccattttatttttctccagagaatagtctgtcttcagtcttgaaggactcagctccctacatcacctttggtaggggtcgtggggcagcacccacaggtctaaatctgggtgggggtgttcggtccttgcaggcttcacaagatcgattcctgactactttgttgtgaattgcacaactcacacagtaatttagcttcacatacatcttgggaagcacataggcgtcgaagatgctcgcttcagaaatgtccctgactgctgtggcctccactgtgttttgaatgacgaatttcttaatggctttatccttgggcacacatcaggcacagttcgtgcagcaaataggctgcacatggccgcagccctttttggcatgaccgttgtcctttcttttctttgtcatcttggaggcacggaccggagagggtattttctacatttttatttttgtctgtctcctctgctgaacgctctactagaaccttctagtgggcactactggatccttttgttcaacattatgcttccaactttcagcatgatacctgacacattgtagatgctcagtaaatatctgtgacctgaataagtaactaaatgttagattaacttttcattgttttctaagctcttattcagtaaatacttgcaattcgttagcatttgcttttagaacttaatcagatttgaaatgtttataaataatctttgtatatttcctaaaatatttagttttcctccttaagatttttttggcattatttgaaattaaatcaagtagttgcttgcttattttgaggaaaaattattttagctagaattaaatagaaaagaaattcattttcattatcctttcaaaaccttttctgatgtccccaaagctaatgtaggggctgtgcctctgtgccctcatattaccctgtatttctccccagtcatagtgctcacaacactacattatatttatgtgtttgtctatctcactcacaagataagctgaagcacaaggaacaagttgttcatcccaggctaaataactggtacatggtaggcactaaagacgtatttgttgggtgaatgatggatggatatagtactgtgatcgttagtgaacttctggaggcagagagactctgaaattcataatcttattcccactgtatctgtcatgttgccctgaacctagatgaccctcaagaaaaatttgataaataaatgtgtcaatgaatgcttcaatggtaaaccgactgaagaagtttggttactcttttataacttttataattgttataaacagtatcataggctcacctggttttgaatgctaacaccctgcttacaaagcaaactccttaattttcattaaccccagttttctcattaagaaaacagtgcttcctgaagttattataaggattaagttaataaaataatttcttagtatagtgcctggtacacaacaaactcttagtaattcataccaaataaaattggccttttgtaaccagaaatcttgatacaccagtcttttactgtttgctgctttcttataagcttggttttactttattttttaaattgatttaaaaaaatttttttgttgtgtttaaaactaccactaggtgtcagtaatatcctgtgactttcagttacagtgcaacctaattaggcagagagcaatgtgaatttatgcaacgttgaagtctggcttatctgtagctcctaatgaaaaatgccaaattccctcctcctttctgatcaaagcccaccgaataatgaagctggagctgttactgatgcttggctgagtggaatgtaaatgaatgccaaaaatgaattcttttgaattctttcatcccctgggatcatcccccaggactgaccaaagagcagtgcgtgaagtgcaggtaaccctctggaaaggctgaatcccccagccccaacttcttcacctgtcaccacccattattaccaccacaccccaccctgggaatccctgctaaccagaactcctaacacgtgggagaactatataaatatctggtgaggttgtaccttgaaaagaacaggacaggaggatgctttcattgccaaaactgaccctgacatctccagacagaactaagaacacactttctgggaaatatatatgtatttttcagttacacttttgatttgtgtacccagtgctgtgcctccactttatattcattcaacaaatatttaactcactaagggtcccttgtttggcaggaagggtgctgaagatagacagatgaatgggacagtatggtgaactcgtgagttagactgcttctgggtttgagttatcttcatcttgcaccagctgtgtatttttaggcaagtttcttaatttctctatgcctcagcttactcacccgtacattggtgataaagatagtaccttcctcctaggattgtcagggtgaaatgaaatgcttatatgtaaaatacttggtagcatggcacatagtcagcattctatgatctctgtgatctctgcctgttggtgttacgatgttcctgttctcgggcagtttaatggaggagacaagtaaagaagtagttatagtacagtatgggtacaaaatgtcataggaacaaaaaaaactaaagtaggcttttgtggagctaaaactcctcccaaaaacctaacctgcttctattatttttattttttgaaaaaggagtgtcttgagttggtgtgactaaataggaataacatgattttacacatgatttggaaccttcggcctcccacttgcttgctggatgaccttggttaagttgcttcccttccttggtctcatcatgatacctactgcatggaattatcataacaattaaatgaaatgaaaatctatagaaacacctaacccagttacctgggatgtagtatcagttctcttcttcctcctgggttccaaccaaaataaagacaactttttggagcgcaacattttcttaaattgagtttctccttttctttggaagttcatttttattattcttgactctacgtaatatttcaatccaggctaacaaaatgtggcctcttagagtccttgggaaaacccaccaattaggtacagaatattttctgagtagtaaattagttatgtacgtgtattgggggggttattgaaaatcctttgtctatgaattcctaaataacattattaatttttactatatttggaagataatttgctgagctagagtaaatttagctccatccacctctatccaaaacttaaacattaaaatagtaaaatctgagtttagtttattgaactattagaagggtcataaatcactgttagtattattgtccatacccttccagatatgagaactggatcaaaagcatgcaagtaccattatgccaaatatatataaggtaaccagcttgatttaggtctaaaagacagactcgtcttggagtaattgtggttttgatctagaaagcatgtctgtatgcctttatgtcatctcatgtttctccctaacttagcactaatcacactgcatcagatgacacaatatatatgaaagatctgggtcagtagtctcatttcataaataacaaagcatgtataattgttcttatttttgagatgctgaggtgttataatcatgtacacccccaaagacatgtataagtatgtcgattgaaggtttttgttttaaatggactaatttacctctgaattgactatcttctgattctgaaaattgaattcatctcataggtaatgtagatgttgcccagacttctaaaatgtggctattttgtatagtccacatctgattcatacattaaaaaaaaaaaattcatgacctactttgctttcagaaattcttcctctgacatgccagaaacaccccaccccagggcctgtgccctcactgtcccctcagcctggcagcctggaactctcttggcccagatggtcacaaggctccatccagcctttattcagataccaccttggtgagaccacccctcatacatactccctctcctccttctctgattcattttttcttctcagcacttgtagcatcctaaatattttacgtatttatattgtttatagtcaattccttgaggacagggatttatctctgttctgtgcgtggctatatgcccagtctagaatggtgcttattcattctcttgtaagtacttaagaaaaatgtgatgaatgaatggcaattacctacctgttctgtagtttaaattatgtttctccccctcaggcatcttggtgtatagagcccacagaataatcgagtcttgtcaagaagcattcatcttgcgcctctttcgccagaaaaacaaacgtggttttattaaagctttcacagacaatgctgttgcctttgatactggtttttgtcatgtggaaagagtgatgagaaatctttttgtgaggaaactgtatctgtggccaaggtaaagaacattatgtgacaaataatgatgacattatttgtcatctttgtttgtgagatctactgtaacttagttgcactttgatgtaatataatgtaaaattcattgtaattttgtttgatagaacctagtcagttttataacaaacacatccagctataaatatgtattcaccaagtttgtggttttatttaagtcgagagcaatttgatggttgcttttctgctggtccatcacatccatccaagacagccactttattctttcttacacatttagggaaactcccagggatctagagacccacatatacaacagctttaggtgtacagcagatttattggctaacattaccacttctgctttgaaaattactcaacagggaaataaagcacaaaggttttgaagaagttttattaatttctaggaataacattaaggtttcagttttcaaacatttttgcaacctatgctaccatgtattttggttataatatatgttattttgagagtagttgtacaccgggtgcagtggcttacgcctgtaatcccagcgctttgggaggccaaggcaggcggatcacctgaggtcaggagttcgagaccagcctggtcaacatggtgaaaccctgtctctactataaatacaaaaattagccaggcgtgttggcacatgcctgtagtcccagctacttgggaggctgaggcaggagaatcacttgaacccaggaggcagaggttgcagtgagctgagatcgcaccattgcactccagcctgggcaacgagcgaaactccatctcaaaaaaaaaaaaaaaaaaaaagagtagttatagtatttttaactttcttgattataccttgttttaggagtcaacaaactcttcatgtaaatggccaggtagtaaatattttgggctttgcaggccatatagactgtcacaattactcaactctgttattgcccaaaaacaagtatagactgcttacataagtaatggtgtgactgcattccagtgagactatagaaacaggtacaggatttggcccagaccgtagtttgctgaccctttccttatctgaataatacactgcttctattcattgaggttcaaagtgtttttgaaaatgttgttgctttgcttttcatttgtttgttgttttgcttttcgtgttgtttgtagcatttataaaaatggggtgttaaaccaagaccagaaatacatagctgctgaaactctagaaaattgttgaaaaatatttgtctctttaggttccatgtagcagtaaactcatttttagaacagcacaaacctgaagttgtagaaatccatgtttctatgacacctaccatgcttgctatacagactgctatactggacattttaaatgcatgtctaaaggaactaaaatgccataacccatcgcttgaagtggaagatttatctttagaaaatgctattggaaaaccttttgacaaggtactctttttccttttaagcacagtttattatgttgtaattttaaagaatgcaagttattttaatatttgcaatgttgttaataggaatttgctgttatttaagaataaaattggaggtcacttaaaaacatagcttctttggtttactggaaagtaataatttatagtaaagtatgtggattggcatataagcatcactctgacttttgcagttatagtaagtgattatctcttattttaactataatcaagaagaaaataaataactttttttactttgaaatgacaacacttggatgtctacaggtagaagagttttacataagaatgctccataattgtacatgaatttatgatctcttttatggaataaaaaataatttggatgagttttcattactgaggagtgtgaaacttgctctgtcttaaaattacattctgaattgaggaaatggtaagacatcagttccaggaatttttattctaactaattttttattatagattaatattgcagatatataaatgtctactttttcattatagattaatattattacagatacataaacgtctagtattgaattggagatccagaaaatgctgaccttttagaaattcttggcagcctttttgtcatattctggtagaaaaagtttctgtcttttaaactctgagtcaatctctatgtcactggcaataatgcgtggcgattataaaaaaggaaaaaattgacttatttctctgattcttcaaaaaagtcagttgactatgaatattgatacataaaactaattttatatattctgttcctctgtgcttaaagttttttatgatttagtccatggtgattttttttaaatcccacacaatcttttaatagaatgtgtatatccctagaaaaataaaattgtagcctaacatgtttcacactgaatttctgttgattatcccccggttagtaacagtcacttcattgttttagatattcttttagtaaccatatctaaatatagatatcccatgtgtcttgttaaaatgtttaatattttgtagatgattttacaaaaaaggcatgtagttatatatcccagtttgttcaggatagtcccagtatctacctgttgtcctgcagtgattataaatagtgtatcatttctttttccacaagtgttctggtttagacaataaactatacagtcatccagatacttctcctgctcattattaaatttgttagataagattccgtgcaatggtactgcttttatatcaggctacaaatttctgattaaaaatcagataattctgtacctaaaaagtaacagaatcagtctgtgaaggaaacatacatatacatagctgtggatatgtaggtacctacatagtgtatacataaagctgttctttgttttagacagcattttggaatcttaaaaaataattggccgggtgcggtggctcacgcctgtaatcccagcactttgggaggccgaggcgggcagatcatgaggtcaggagatcgagaccatcctggctaacacggtgaaacctcgtctctactaaaaatacaaaaaatgagctgggcgtggtggcaacgcctgtagtcccagctacttgggaggctgaggcaggataatggcacgaacctgggaggcggaggttgcagtgagccgagattgtgccactgcactcgagcctggctacagagtgagactccatctcaaaataataataataataatcaaacttagtccattgttaatttaacaaatattttcctatcatgaatccactttagaaaaaaacactaaagaaatttttacaccaacaaattatggtacgttgttatttaatttgataattcttatttaatttgtacatgggcatcaaactaaatttttcatttcttggttataccttattttaaaggtcaaaaaacatgatactcatgtacaaattaaatagcaatgtaccttaatttgttagtaagccatcgtgcttgtgtatgccctctgcttggtccatttggatcccatgtctttatccatccaggatagtcagagtcaaacttggcaggaattgaacatatctgagctacatgcttagattctgttcataaaaacaaataattgattatctgatgtttataaggtcttttctcccctgacagtaatatatatttggatgatagattgactctatctgatcataaagattctagcagtaagacattcttctatatttgaaaatttaaacattattattagaattttattaactgaaatgttctagccacttccttgaataatgcttgcagtttttttattgtagtaaaatatatatgacataaaatttaccattttaaccatttttagatacacaggaaataatccttttgaaagtatgatttgtattaagaataactatacttaacatattttagcaataccaaattttattcttgttttagacaatccgccattatctggatcctttgtggcaccagcttggagccaagactaaatccttagttcaggatttgaagatattacgaactttgctgcagtatctctctcagtatgattgtgtcacatttcttaatcttctggaatctctgagagcaacggaaaaagcttttggtcagaattcaggtgggagattaaaatactaataatattctaagagctgatttgaataaagtgttaggttttagggggaatcaggtgtgaaaagtgctatattcaactatatgttatactgagatttcaaattatgttttatgttcatagcacaaagatgtaggttttattgatagctaatgtttccgcctacttaacgtctgttctgtataataataaatattcatatccgttccgggcaattttatttctagaaaagactgtgtgtagtacaggcagtcctcaacttagaaataggttgtgttctggaagtttagttgttaagaacttaaaattcattttcctcaaagcaaaagcaagggagtatggggcttccatcagctagagtgccaaagactgaagagcagaagagattttagggaaatatacatatacagctggccaccatctcgtttggctaccactgttttggcctctgtcactgtttgaccagaccagcggttttcaaagtgtggtccgtgaacccctggggtcaagatttaatacagttaataattctgatggttctttagggacattcttaagtgatgaactgcagaagcatgacagtaaagaatgcactgaatgccagtacactttcatggcactgccttggttcatgctacggcaccagcatgtacaattatggagcattcttatgtaaaactcttctacctgtagatatccaaatgttgtcatttcaaagtaaaaaatgttatttattttcctcttgattatagttaaaataagagataaccacttactatataactgcaaaagtcagagtgatgcttatatgccaatccacatattttcctataaattattactttccagtaaaccaaagaagctgtgttttaaatgacctccaattttattcttaaataacagcaaattcctattaacaacattgcaaatattaaaataacttgcttttacgccatcactggaaatgtcaacgcagtgaaaaaagtcaaataatgtcatggtattgttacgagaaaagttctgacatcacatagccctgaaaatatcttgggggcccctgggagttcacggaccacacccagaaaaccactggtccagctgaacagcgacagatcacagtagtgggaggcggtgtggttggtaggaagacaggatgacagccagttacgtatgtaggtcatgtgaccatcagagactgttttaaattaaccataaattgatggcactttttcttttaacttttcatattaggttggctgtttcttgactccagcacctcgatgtttataaatgctcgagcaagggtttatcatcttccagatgccaaaatgagtaaaaaagaaaaaatatctgaaaaaatggaaattaaagaaggggaaggtatcttgtggggttaagtctttaaatgtgttttttatttcggtatttggtatggaaatttaaagtgcaatttaaagtcttctttggccatgtgaaaagtgtgttccttgaagataaatgtatgtatgtttgttatatgtaacatgtaatgtatgttgaaagtatatatgtaaagtatatgtgtaatgtatgtcgaagtatacagcatggcaagtcttgcagtctattgcccagggcttccaaataacagatgtcaaatattgatcaaaagtatgctacatgaggagctatatattgatttttttagaacttcaaagtaattattatttttgagtcagaatgaggttggggcatggtggcacacacctataatcccagccctttgggaggccgaggcaggaggattgcttgagcccgggagttcaagaccatcctgggcaacaaagcaagactccatctctacaaaaaaaattttaaggctgggctcagtggctcacgtctgtaatcccagcactttgggaggctgaggcaggccgatcacctgaggtcaggagtttgagaccagcctggccaatatggtgaaaccccgtctctattaaaaataccaaaaattagccaggcgtggtggcgggcacctgtaatcccagctactcaggaggctgaggcaggagaatcacttgaacccaggaggcggaggttgcagtgagctgagatcacactactgcactccagcctgggcaacagagtgagactcggtctcaaaaaaaaaaaaaaaaaaaaacacaaaaacttttaaagtagcctggcgaggtgatgtgcacttatcgtctcagctacttgagaggctaaggtgagcccaggagttgaaggtgacaccaagatatgatcacaccactatactccagcctgggtgacagagtacgactgtgtctcaaaactaataaataaagtcaggatggaatatttgaatatcctttttaatttttaagcaacataaatatactagaatgaggcaaatatgggttttattccagcatcttatctagtgataccgtaaatatcactagttttttaaggcatgggatagggttaatgcctgctttctgcctagtttaaaggtctgtttcaaaacttaactgaggccgggcgcggtggctcatgcctgtaatcccagtactttgggaagccagtgcaggtggatcacctgaggtcaggagttcgagactagcctgaccaacatggtgaaatcctctctctactaaaaatacaaaattagccaggagtggtggcacatgcctgtaatcccagctacttgggaggctgaggcaggagacttgcttgaacccaggaggcagaggttgcaacgagccgagatcatgccattgcctccagcctgggcagtaagagtgaaacttcgtcttaaaaaaaaaaaatctttttaaagaaaacttaattgaatatattattgatgtgtttgtgtttgaatgcgtataggaacaaaaaatttaattgttgtctacttttatccatgttcaggattatgaaagtcatggggattttagaaatagtaaatactgtcattgtgtaccgatgcctttgttttgtatagctgcttatatatagtgtcacagaaacaactaacacagaatggtctctcattagtgaccatgcatataactttctaccaaggcattttgaaagccatattaatggtttgaagtatctttcatttacaccttaagtagatctttttcaggaaagcagattccatctaacattataaagaaagcttaaataaatgggcatatgtactgatgctcgtgttatctgttgttttaaaagcctttggaagactttatgggtaaatattatcacatagaatgagatatttttatttctctacagaaacaaaaaaggaactggtcctagaaagcaacccaaagtgggaggcactgactgaagtattaaaagaaattgaggcagaaaataaggagagtgaagctcttggtggtccaggtaggaaaaaaggagatgaaaacatttgcttccaaaatctatcaaatgagtcctgatttaattagctctttaaaagtagttcaagactagcctgaccaacatggtgaaaccctgtctctattttaaaacactgctattttatctataaaatgtagacaaataaatggcaaatgaacactgagatcctagtggcaacctcatttctgttcgtttgatgttgttttctccaggttgaatcattgtatattcatgaaagcaggtttttaaactagttgggttcttagaacttctatttaaagattgagctaatctctacacatattcaccaagctttaaatctggaatccccaaggaataaactaatgggtctcctgttttatatcctcagccaagtatctttccaaaaaagcctcaactcttctattacttcaatatgtaatgagccggtacaaactgaagacattgtctaaattggcagaggagactaacacaattcacaaaagaggaaaaatccatttggaattaatttaggcatatatgagatcctctggaaaaaaatattaattaaaaagaacttctttaaagccccaattacaccacagttgtactttcataagattaaatagtctggcttcaactttactgaaaagatttaagtaatcttgccagagaggagaaagcatttgatcaatacctaagaccctttttaaatagtttgtaaattgtggatctttaataccaaagggtaagatgtcttcccttcgggtgaaggaataagggggcacagggaaactaggaggacaagtgaggtaatagtaacataatgttgttttctattttcaggtcaagtactgatttgtgcaagtgatgaccgaacatgttcccagctgagagactatatcactcttggagcggaggccttcttattgaggctctacaggaaaacctttgagaaggatagcaaagctgaagaagtctggatgaaatttaggaaggaagacagttcaaagagaattaggaaatctcacaaaagacctaaagacccccaaaacaaagaacgggcttctaccaaagaaagaaccctcaaaaagaaaaaacggaagttgaccttaactcaaatggtaggaaaacctgaagaactggaagaggaaggagatgtcgaggaaggatatcgtcgagaaataagcagtagcccagaaagctgcccggaagaaattaagcatgaagaatttgatgtaaatttgtcatcggatgctgctttcggaatcctgaaagaacccctcactatcatccatccgcttctgggttgcagcgacccctatgctctgacaagggtactacatgaagtggagccaagatacgtggttctttatgacgcagagctaacctttgttcggcagcttgaaatttacagggcgagtaggcctgggaaacctctgaggcaagttataaagaatcacagctttcagttgcacagttctttaggatttaacccagaaactataccagttgcatgttagttttctttaatatccgttacgatgctgcttatgtttatgaaaccttattttgcttcctgatgaatctgggaagttggataggaaggatgtcaagtatcacagcagaacaacaaaccaaggggactgctcttgttctcgttacgtgctgctgtgcgttctctcctttattctttgggtattggtttgcatcgtatggggtactgtatctgaaaaagtctgggaaatgcataatattctaatttctaacaaaagttaatataactgtgactcggctaagtaattttaatcttctaaaatatctttcctataaattttaagaaatgactctaaattacatccatataaaactaaagtgttgggggaattactgtaccaggttttcttgagtttcaagatatatcagatgaaacatctacagaaatatcagatgagaaaatgatgcctcccaaagaagatagtgttctggctttccaattatctgaggggaaataaacagcaaaattaatatcctgaactcagtctgaaccaaaaacggagccaaaagaaaccttcccctagcattttaactaacacagcctttcagagtagagatgaatggaggagctggatcagaaataatgcaggatgaagagattagatgaggctggtaaaataattataggctggtaaattttttgtaccgtgctgttgatcaactttgtagatagcttatgtacaccaagcttctttcttgcctgagaacagaatagtgtggtatttgggagcaaaatgttagaatcagaagggacctgggagttcaaccacttactctatcaacgggaaactgaggcccagaaatggtgactgagttggccttggccacatgacacatccgtgggagagctgagtctcttgactcatcacccaatgatcttttctctgtttacacttcaaagaattatcatctaggaagataacagctaaaagaaaaaccaaggctcaaaaaggaaaatagctttgactgaaggtgaagcaaagggacagaggaggtgcttaattcagctctcttagcaacaaacaagatggaaaagcaggccttttttttttttcctttttttttttttctttgaggcagtgtcttgcccagatgcccagactggagtgcagtgttgcaatcatggctcactgcagcctcaacacctccccctttccctgactcacgtgattctcccacatcagccccaagtggctgggactacaggcatgtgccaccatgctcaactaattttttttttttttttgtagagatggggtctcagtatattacccaggctgatcttctgagctcaaatgatcctcccacctcagccccccaaagtgctgggattacaggtgtgagccaccgtgcccagcctaaaaaccaggacttttctaagagaaagtagatcaaattattctttgagatgcctgatgtaatccatacgtcttccatgcccatgtatttatataaaatgtgtgaccgctgtattctgttaagacatgaattaaaaaaaacgttcataggctggttttcataactactgtccaactttttaaatgattgtttggctgaggtacaaagaaagaattggagaagcctctaaaatttgtgtgtttttctgtttgtttatagttatgaggagagaattattctatccctctagttatatttcagtgtttacctaaactcgtttcttccttttggcaaaagaaaataaaaaatgccctgtgtggtaacgagacctttaacaggtggggtttaggcagcttaatttgagctagtgtgtgataaatgaaacctttgattcttagtcaaatatttattatttgagcgctctaggttgctgatttcacatgttctgctgttcctttcagggattaaaaatgctgtttttccaacctaaaagttctgtcttaacatgcagggtttactttcttatatacggaggttcaactgaggaacaacgctatctcactgctttgcggaaagaaaaggaagcttttgaaaaactcataaggtaatacatagaaaatcagtatgaaagccccaactacattggaaacctctggatgggggaatatcagatagtcctgctcaggaaggatagggcaaggaagacgttggagaggatcacattgagataaacctgtggtctgaattgtcctccagtgtagatctcagcacatacttcctttttctcttccccgtctcttccttcatctccagttgcttttcagtggtttgtttaatagaatattagaaatgtgacaaagacaactgcttttttgtttgtgaagcagtatgataaaacacgagaaatatagctaaaatactgcttttctaagaaatacattagtaaatctccctcctccctgccttatgcacaatatgtccttgggtgggtggctgctttaccgtttattgggaaatgcttttacaacacagccaattatgatcaccatcaatagaatcactctgggaaaatatttcttaggaagtgtgttgtttgtctggacatacacgtgtatgtttttaagaatgagtatctggtactattccaaatccaagtagaaaatgcccttccattttacgaaaggaaaatggtgagatgttcacaaactggttggctacctcttgccctgaaggcattcgataaatctgataaccacctaccagggatattgtcaagaagattgcagcctggtgtgggaagatgggccagataatctctaagggcctcagaagccagggcaagtgctggatggggcatcacagagctgagccagagaaagttagatcagcagagaccatggcctggacggagtgggctgggccagagcaaacttccaagcctcagacattggcaatggagggcagaaattatttttagcagtagtcaacctgcgaggactgccaagaccctaggccaaatttcaaaatggataaccattctgcagtggtggctgcgggttctcagtgtatgtgcaaaatatacatataacctggatagcccaggagaagaattcttggaaatgggggtatttgctgaatcagtggcatggagtcccacgatgggggtcagcatggtgcatgggcggtcccctcttttcccttcacatcctctcgaatggtgatatgccttggccatggattcatccagctgctagtcatacaagtattgctcagtcctctcagcctatgaaaatatgtttcctaccagtgtgctctatgggattgtttatgtcgtatatgtgggtatatatatttttcaaaaacctagttcagaaatcgtgttataacagaccaggcattataccagccgcctcttgttccaggctctttgctcctctctgtcttactctttgtctgctagaccttcacgccacaaggctcaaagagtaaacaggtatttattaagcatctggtatgtgccaggccctgtgctaatattaaagtgctgaggttacaagtggtgcagaaaaagcctctgccctcctggaacttaccctttagtggaaaagacagacattaaattattataaatattgtaataagtagaggtatacagagcaccgctggctgcaaaggtaaaagaagagggtgtaataggagagtacatcaaagacctcacccagaccacaagctgatcgggagccgcttccctgaggaaatgatattcaagctgatactaggcagatggggtggaaagggggttatgttgaacaaaggcgtgcacgaaggctcccaggtacaagaggccctgtaaaggatttagggcttcacgggcagtaagaccgcactgaagcattctaagtaggaaagggacttaggtatgtttgtaaaggctttctctggcatcaagctgaggagtgagtgagggtggaaaccagtcagaatgctagtgcagtctgatgggagaaggtggtagccaagattaggttaatggaggaaagaagacagatttgagagagatttgggagatagaatcaaagaattggtgatactggatgtgggccagtacctcctgaccattccttcactctttttagaacagcctttgcccaagttttcgctcattaaaataattgtcacctagatagaaatgagtgcacagagctaaaatactcagattgggttttcagtgttcatgtcagggttccccaagatcatcctcaggctcgatgattcactagaactcacatgagtcagaaaaggtgttatactcacaatacagtttcttccagcaaaaggatacagattaagactggatgcagtggctcacgcctgtaatcccagcacttttgggaggccaaggcgggcagatcacttgaagtcaggagttcacgaccagcctggccaacatggtgaaaccctgcctctactaaaaatgcaaaaattagccaggagtggtggcgcatgcctgtaatcccagctacccgggaggctaaggtgggagaatcactcaaaccccaggaggtggaggttgcagtgagcttagatcgtgccactgcactccagcctgggcaaccgagtgacccccgtctcaaaaaaaaaaaagaaaaaaaagattaaaatcagcaaagggaaaaggcacatggggcaaagtccaggtaaaaccaggcctaagcttccaggtgtcctctcccagtggagtcacatggatgtgctgagtcctcccagcaacagtgtgtgaccacacatgcaaagtgttgtcaacagggaaactcacctgagccttgagtccccacatttttactgagctgagtcacatagacacagagtacctccatggctggctacagctcctcagactccagcccccaaagcagcaacagacatttacgataaatcacatcgtcagcataaactatctgatccagctggcacattgtgacccaaggcctcaggcatataaaaaccttatcagggagaatactccaggggctcagagctcatctcccaggagctgaccaagagccagtgttgaggagagaagcctttcttggaaacatgcagagtttgagcagcccaggcctgctgagttaatcctttcctgcacagcgttagagccagaggagcctgatagaatgggaggaagacagcacctgagtaggtgagtttcttgcttcgcctgtcttcatgcagctgcctcttctccagtgcatcagggaatctaatctagaaaagagcacttttagtagatagtagtaaggtaccagatcccatgccattcctgatttatgcacctgcttctacacatcaaaggactcagtgacaagatgtggattagccttatacatactggaaaacctcactcagcagaacctggatcatggactctctcccacatttcaatccatagaaaaatttctgcaccaggttttaacataattttatctgttatctggcataatttttaatgctttcaatgatgattgtctacttgtcataaataagatcttcccattttacccagcagtcaatcagatagttgcactgttaagaatcttaagatacttactttcccaggaaacttgggaaatttgagaggtgcttcttttgcaaagcaaaaacatatttgaggtgcattgttcaaaaaacatttgcactgtgtacttaagagaaaaatttaatatgaagatgagacaatgtgcttttaccaagacctccatgggtgatgttgtaagaacaaaagcagttgtggctctttaaccagaaaggaacaaatcaggtgaactgacagtgaaaggattgtttagctggattaaagatctgtagattatagataacagataaagtggaaaagattacactgctaaatatcataataattttatttctacccagggacgtaaaatgctccctgggtagaaaacttagtaataacatcctcagtatacatagctttgaggaggtcactgcttttcaaaggaaagggtaagattatttgaaattttactttttgaaaatacgatcacaaaatgggctagcatgagggcttaagtaaatgcccattggaagagacttctagttcagtgctactttcctatgttgccataggattatgttgtacacggtattcaaataacattgaagactgggtgcagtggctcacgcctgtaatcccagcaccttggaaggccaaggcgagaggatcacttgagcccaggagctcaagaccaccatgggcaacatgtgagaatccatctcaatttgtttaaaaattaaaataaaataaattttaataaaaataccattgaagatactaaagcaaacataggaaagcttggtgctttaagcagaaataggaatctgaattttttaattgttttgtgtctgtcacataggggaacttggataattatgccacatgttgaaagcaagagactggctgtttataattacgatacatttctgttaaactgaattactgcttaggaaggcttattttcttcatagtccaggtttcatctcgaatatattttttctcacattcgacttgtagttaagttataacatttagtggtaaactagctgttttctgtagctattaatggaaacaattgtggaattatttgaaagcaaatcttcagttttttagtataatcatggataattagacgaagagattaccacgttataagaaaagtacagtaataataacacctaacatttatatagtgcttactaggtgccaggcactgttctgagcgccttgcatatgttatgtaatcctcataacagtcttttgaggtaagtttttaaattattatcctcattttaccaataaagaagttgaagtacagagccatgaaatgacttgcctaaggtcacgtggccagtaaatggtttcagatccacacactttggaaccggaatctgtactctaaccccctaagattatacagactacaaattaatcaggaaattgggatgatcccatgtgtgatatacagcttagccagtgtaacaagtagaaacaaagtgggggacacaacataataataccaaatgaatgttaaggaaaaatagaagagcagtaatttttttgaatggtctgccctttgtcctaaccagagtgcaatagagagaatggagtggtaatgagtggcagccagagccattgccattgcagagggcttttcagcaggtagcgcttgagtctggtattgagaataatgagaaaaacatggaactgaaaccattgtctgcccccttgtgatctacttataaaatttgtactaataatatatttgcatttataggttgtttcaaatagtataaaattttaaattacaatttctgttctttagtagtatcttctagtgataccctgctctaaaatatttatccagagtggttgaagaattgaaccctctgatttcatttcctctaatgggtgtattagtccattttcatattgctatgaagaaataccccagacttggtaatttataaagaaaagaggtttagttgattcacaagtttcacatggctggggaggccttgggaaacttacaatcatggcagaaggggaagcaaacttgtccttcttcacatggcagcaggagagagaatgagtgccagcaggacaaatgccagacacttctaaaaccatcagatctcgtgagaactcactcactatcatgagaataacatgggggaaaccacccccatgactcaatcacttcccaccaggtcccttccaggacacatggggattatcggaactattaattcaagatgagatttgcgtggggacccagccagaccatatcaatgggaaaatcttggttgttttaacccttgttgaaattaattaacattgatggttcctcttctgttcccctcaccttagtctgttttatcgcagttcctcagttccagttgtttttttttttcttctcatgtttgctttgttccctcgacatcagttgtgaacccaagcagggaagagactcagcttatatatcttttctgtcatacctggcagaattaattataacatactttatcaattttgaaaaataaggctaccgcaaacctggcttactctttctgtgattattgaggatcttgtcatgatgtagttccaaattgcgaatcttagttatgattgtactgtcctctagatctaccgtataagatatgagccaccttgaagacaggaattcttgcgtgatcacgattatatccaaagtacctagagcaccacgcaggaacactccataaatgtttttcaataaatgcatgagtgagtaatgaatgctgctcccaaggcataacctgagctgttgattttttgttttaatctctgatagaaatttgatttcttatatctatttcaaaatcttgatcttgattttcctttaaaactcagggtgtttaatgggacctcccacctggagtttttaacatcaaaattctatcatatatgttttttagtttcttaatgatttttaaccacccctatttgtgattaccctgaaaatgtttgaatataaatgatttacatttacactttaaccttacaaacagtctcaagaatctcttggtggcattttttacatgtggcattttttgacatgcttgtgttgtttcttaaatatttgaatataaagtcaaaataaacaactgctttttttactctggaaaatcaagaagtagtatccgaccaaggcactttttactgactttttctacttcctttacccatcatttgtcttggcatatttacttctaatatattccttgtttttgtttttgtttttctcttactgctatcatcatgtagatcattttcaatactacaatttacacacaataaaatctagaattttgaaatttgtttcagaagtgttgacaatgttttctcccacagggaaaaagcaagcatggttgtccctgaagaaagagaaggcagagatgaaacaaacttagacctagtaagaggcacagcatctgcagatgtttccactgacactcggaaagccggtgagtcctgcactttgtcaggcacctccattgcctgcaaagggggctgtgaagttccagagttactctgccaaggcttggtctgtattaacaaactcttaaaaatgggggttgggccaaggagaggatgtgtacttccctactctaatctcagctctgccattcactaaccatgtgtcctccccagagtgaaggcactgtgtcatctgcgaatcatgtgaggttgagttttaggcaccccagcttagaatgggttatgttccagcatttcctttatatttggttggttgagactcagaatgtacttttgcaaataaactttgttaaacggtgattaggttcttatctcaacctaaaaagccagtttaactcagagtagttaaaggaagtttctccttccctcctctgcctctccccttagttgtatacataggtggggtgcatacactcctcctctccttctgtattcatttcttcttggtagctccccagatacctggtgtctggtacgcattgctgtgcagtgtccaaactgtggcatgccaccaagacctgctgaattccaagtgcactgtgatccagaagtcaccattttcccattccccaaattcctattttcctatgccagcagctgatttcagccaggtggcatgagaaaagcaatacgattgagttggtttaaccttcggtgaggccaagtacagttgaagcagtgggtgtcagaatttagtagactttagaataacctcagatgctcattaaaactgtagattcataaccctcaattcatagaaattccaactcagtggatgtgaaatggagccagcagctcgggggcttctgatggaagtggtttttggaccatactttgggaaacattgcctcagagcctctgtgtcttgttcaaagaagattctttgaaatatcaaccaggttgttgacatttcatgaagaacgacagaatgtaaggcagtatgggtaccacacagagagctgttcgtagaagtctttccttagagatcagttctccacgccttcatattagttgcctatggctgctataacgaattaccccagacttagtggctcaaaacagcacacattttattatgttacagttctgcaggttcaaagtccaaatgggtttcacaaggctaaaatcaagatatcggcatggctgcattcctcctggaggctctaggggagaatccctttcctggccttttccagcctctagaggccacctgatttccttagcttatagccccttcctccatcttcatagccagtagcatagcatcctcccttctctgatcatcctgcctccatctttcacttctgagaatccttcagcctacctagataagccagataatctcccaatctcaaaatgcttaacggagatacattctgagaaatgtgtcattaggcgatttcatcattacatgaacatcacagaacgtgcttacacaaagctagacggtctagcctgctgcacagctaggctatgtggtatggcctatggctcctgggccacaaacctgcacagcatgttactgtactgaatactctaggcaactgtaacacaatggtaagtatttgtgtatgtaaacacatctaaacatagaaaggtacaaaaatacagtattgtgatcttacgggatcactgtcttatatgcactttgtcattgaccaaaacgttgttgtacagcacatgaccgtattaataggttgcagggatttggatgtggacatctttgcggggtaccattattctgcctacagcagcccttgatacttaaaaatgtgatccttaaacaagcagcattagcatcacctggcattttgttatgaatgcagattcttagaccccttagatctcagacctactaaatacaacatctgtttttttgtttgtttgtttgtttgtttgtttgtttttgagacggagtttcacccttgttgtccaggctggagtgcactggtgcagtctcggctaactgcaacctccacctcctgggctcaagcaattctcctgccacagcctcccgagtagctgggattacaggtgcacgccaccacacccggctaattttttgtattttttgtagagacggggtttcaccatgttagccaggatggtctcaaactcctttcctcaggtgatccgtccacctcggcctcccaaagtgctgggatcacaggcgtgagccaccgcgcccggcccgaatctgctttttaatgtgaccccaggtggctcatgtgcatgttataatgtgagaagctgtggtctaagatgttcatgtttttcccagctccttccctttccccatctctggactcactgatataaatacaatagtccctaaatcactagatttgctcagtgagcatttttaacatctactggggccgctattttaagcctctaccctcaggctttgtcctaggaattgggaatacattgaccaacaaaatgtggtcagtgaggaaactacagaggggagaccttagcaggtatgtgtggatttatgaatcatcgcaagtaaggaactactgacagtctaactttcctattagctcggtttccttcaagggaaattgcctctactttataaacaaatctttttgaaaatatagaaattatatggaatattaccatatagaattatgtaaccatccatcagagttaacaacagaaacatcgatttttagattttgttatattccttctttgagagttcttccccagtgacattacttactttttctctgtaggtggccaggaacagaatggtacacagcaaagcatagttgtggatatgcgtgaatttcgaagtgagcttccatctctgatccatcgtcggggcattgacattgaacccgtgactttagaggttggagattacatcctcactccagaaatgtgcgtggagcgcaagagtatcagtgatttaatcggctctttaaataacggccgcctctacagccagtgcatctccatgtcccgctactacaagcgtcccgtgcttctgattgagtttgaccctagcaagcctttctctctcacttcccgaggtgccttgtttcaggagatctccagcaatgacattagttccaaactcactcttcttacacttcacttccccagactacggattctctggtgcccctctcctcatgcaacggcggagttgtttgaggagctgaaacaaagcaagccacagcctgatgcggcgacagcactggccattacagcagattctgaaacccttcccgagtcagagaagtataatcctggtccccaagacttcttgttaaaaatgccaggggtgaatgccaaaaactgccgctccttgatgcaccacgttaagaacatcgcagaattagcagccctgtcacaagacgagctcacgagtattctggggaatgctgcaaatgccaaacagctttatgatttcattcacacctcttttgcagaagtcgtatcaaaaggaaaagggaaaaagtgaacagtgatggctgttttcttatcccatgcctgtacttttcagcggctccttgccagacatcataggtcattattaattattggtttgctatttcattcttttccaatgctcttaatgattgtacggtggaccagaagccaggattcctctctgaactctgcagttaggcatcacttgaacttgcctgtgcctgctctttttcctccctgcaccgtctatgccgggcttagcatgtttctttttaaatgaggtttgtcaggatcaggtaaagttcctacaagtgattacagaaggtagaaactttacctgatcctaacagatctcatttagaaaggaatatgctaagcctggcatggacggtgcagggagggaaaagagcaggcacaagaaagctaccatttttaacagtccttgttatctagtgcaacataaataacagtcttaattgcacttatacccatgtcctgtggctctccaaatctggtctttgctgttgtgtctgctggacgcttgaactgatgtttgtgtaggaaatcatgttctgaccctttgtctacaaaggagccttctggaacactgagaagaaacatctctttgccattcctgaccagttctctctaccacattttcttcagctccatacttctgcctgtctgctctaaggaaatttcatggagccttcctactactaattcaagacagtctcctcaaaaactggttgactagtcttctaatgaccctaacatatgtagcatatactataatttcattgttccaaattagtatttttaaagcaaaatgaattacctgtttgcaaaagttaatgatgaaggagctcttagaattctcaatttttgcacatattcagtctcctaatatcagagatccctaagtccagctggctagttacagagttttttcagacttcctcgtttctcagctcttatatcctaagacaccagcatcatatcctctagaaatacaacctaattggcagtgagccgagatcgcaccactgcacccctgcctgggcgacagagtgagactttgtctctattacaaaaagaaaagaaaagaaatacaacctaagctcacctgcctgtgattcctcatttctcaccatcctgtgccagggtggctacttctctctgtgaggactcaaatacaagccaatgagtggcccactaagcttttaagatttgattttcctgccttgagataaaaaggagtgtaggtaaatgaaagatcaatgtatggaatatataaaaatacgaaagaaatatatacgtttaaaaatccataaagaaaaaaatctcattctaaacctgattaagttggctttttacgtaagtgtacaaataggatattcacagcatctttgtgcagtttttaaacttttatatttaaacattattaagttggcttttgttcacatgttgagtaatgggtagtaaattttctatatcagctcctggcgacagagcgagactccatctcaaaaaaaaaaaaaagtgacagtagtggaataaaattctaggtcttgtccaccagctcagcattcttttaatcacaccatgcttttctacaccctgcagtttcttcttagttgttcctatagcactcagttccttacttaaaaaaaaatggaaaatgctgaagaaggaaaaggcacaggatccaacagaatatggcaacttggaagatgacaacagtcagcagcaccagggagcaaaatggaaataattttgtttctttccttagaacattaactgtgggctttccaaaatttgtccttcaacttcatttctactttagacaggctctatttgaggtccatctcatcccctttcttcccattcccctccaaatactgctgcattaaccttgccttttcctttcacttcttcctctaatcctaaacttgatcattccctaaaaatctttttataatcccaatagtctttagaactagaactactcatctctgcatttgttcccaactttctcaaaagctcagtcccaaaatgctgcctcatattttttcatctttcatcactcctcaaccacatgtaatatgccccctgccccagtatttcataattgccctcaataagcccctccaattgcctggattccccagcaagcactttctaaataatactggtctcttcccaactaaaaaaataatactcatctgttgctatagactgaatgtttgtcctccccacaaattcatattctgaagtcctaacccctgatgtgattgtatcaggaggttgagctatggcagaaccctcatgaatgggattaatgcccttaaaaaagagcccagagagctccctttcttgccaccatgtgaggatacagtgagaagacagctgtctattagccgggaagcaggcccttgccagacagaacctgcctgaaccttgatcttggactagaactgtatgaaataaatttctgttgtttataagccatccaatctatggcagtctgttattgtagcccaaactgactaagacatctatactatcagatgtctagtcatcctctccagaagtctattcctgctttgctgcactctcaccaacattgaatataatttaattattctcaatatgataggtgaaatatctctcgttttcactttcctctcttgcagtgaggatggccatttgacacagttacagcaaatgagtcttaaacaggtatcactgactgggcttctgaagatttttaaaaagaaagtcaacactgctgccatgggcctcatgccctttgccctcccttctgcctgcctagagcctgtttgattcctcatcccaattaacccacacacactgactacattaatgtttctatcaccagctaggatcatgatgggtttcctggaaaagtcaaagacttcaggacagtcagctgtctacagaataaaatacagggtcctttgattaagacctcacaatatcacttttttccctatatttgtcaaggccattatacggcaaactccatttccaaaacatgccttctttggtcagatatcgtctgatagaatgatcaaaaggaataaaaacctacagaaaccatctaagaaaaatgaagactcactgaaaaaattcaagagaatctcacagaccctaaatataagaaataacggggggcctcggggggaatgagaagtcatttggcagctactctgctggcaccaattggagccctgctccttcaagtgtggtctggtaaccagaagtactggcatcgccacatcaccagggaacttcatagaaatgcagactccacacttactgcatatctgtaagacctcaggattcctttacacattcacatttaagaagcaaaaattaagagcacttcctcccttccacattaccttccctgtgtacagctgtattccccaaaaccaaaataaaaatactgaactgagcacacattataagctaggtatttgatatgtgttatctcatttaaacctcaacccacaagatagtactattacctccttttattattaacccattttcagagatgagaacactcaaataacctactcaaagtcacgcaaattaggaagcagcacagttgggactggacctcagaaaagtctcctctaaagactgtgcttttaagcacttctatctgtgtgaaaaggctgttaattctgtatcctccacactatgtgaataatgcttagaaatggcaaggaacccccaaactactgagtcccttaattttgtctgagaaaggcaggattccaaaattagcattgaagagtcagaatgaagggtttgaaaaaagatctgttcttggaattagacacaacaaactttgaagacagaaagataaggactacctatctctatgaatcatcaaaatttactcaaacttcactctgtatgactggccaataaacacagtatgtttatatgttgctaaagctggctttatgcctaaagtgctaaattccaacagagtgggaaatatgtacctcccttaccagtctggaggccctggaggcctgttcctgcagccagtggagatgagccccccagctcacttcctccctccagttgtgagatcacagcaggtttgagaagtggaaatcctggtttgggagaggtaaataggagagacagatgaataaactcccacagacaaattcctaagcctcttctcagactgtctcagcaatggggagggaaggtaagaaccccaggaggtcccaagcctcaggactacgggaaagtactgtggggcttaggaaggactaaagagaccttggagacttccaagggctttgggaggcaaatgtgggggttgggggtgaaggcttgggaacgtgtgggagagcctggttagggcccagactgtaggcctaggagacctcatgcagggcaagcagggagattctgcccaaagggataccactttttgaccttggcctgaaataatccagagtacactgagatccttgaaaagactcaagacaggtaagatgagggggcaactgaagatgccactgtggaacaggaagcaactggattccagtgtttccaaaacatagctttcatgggttggatcaacagtgcataccagttccaagcaaagtcctatataggcctacaaaaggcttggcatttgcccctgccagtaacctctaagtctagattaggaacagctctggggttctcactcagtaaaggattaccagagatcccctcagtaacctgtaagggagaagcaagccaggaaccccaattggcagattccaggttcccagggtagagaggtcttacccagggaggccacattcccataattctccagcatcacatccctgtacagggtcctctgtgcaggggacaggccatcccattccgcctgggtgaagtacacagccacgtcctcaaaggtcaccgacttctgaaacaataggttcctgctgccctagggccaattccatagctcaggccctaagtgaggggcagagcgcagtataagggcttggggagggtgcttgtgagagcacaaaattagtattaacaacaaggggaagatctcagaaaaaaaatatcgagaaagtaaactacaaagtatccacattctcccacagcagggaaacctcatgccatttttcacacaaataagaggtcacattaagacaggctgaaagaaaaaaatttccataagcaaattctctaaagccaactccactcttttagataagctgctccctcccagcaaactcggggctgatccaccagcaggtcccacaccactcccctgcgcctaacctcagccctgttctgctgcccaccccctgaactcccatttcagtggatc

SEQ ID NO: 307 - DNA, 847 bp, Homo sapiens
agtggcttcctaacagcagaagaactaacaatccactgaataaagaaaaagaatgggctcgatggaggaataagaagctagttatagtcatcggtagaattgtgaaaggcgcaatttgattggttaaaattgttctttgacgagccaaccaattagaaaggaaataaggtgaaggctattttacatgtatgcgtcactgacacattgcccaatcagagctggatattttgaattctttatttgcatgaaaggcctataaaaggagagactctagacacgagcttttatttaagtgcgttcattctcactgctgttattgttttctgacagcatgcctgaaccagctaagtcagctcctgctccgaagaagggttccaagaaggctgtgaccaaggcgcagaagaaggatggcaagaagcgcaagcgcagtcgtaaggagagctactccgtgtatgtgtacaaggtgctaaaacaggttcaccccgatactggcatctcatccaaggccatgggcatcatgaattccttcgttaacgacatcttcgaacgcatcgcaggcgaggcttcccgtctggcccactacaacaagcgctcgaccattacctccagggagatccagaccgccgtgcgtctgctgcttcccggagagctggccaagcacgcagtgtccgaaggtaccaaggctgtcaccaagtatacaagctccaagtaaatgtgtgcttaggtgctttaaaactcaaaggctcttttcagagccactcaagtctcacataaagagctttaatattgaatttcaccgttttctagggaataagggaatttttcgattttgtaatcccagcacttt

SEQ ID NO: 308 - DNA, 2235 bp, Homo sapiens
atggctgtgctgcctggccctctgcagctgctgggagtgctgcttaccatttccctgagttccatcaggctcattcaggctggtgcctactatgggatcaagccgctgccacctcaaattcctcctcagatgccaccacaaattccacaataccagcccctgggtcagcaagtacctcacatgcctttggccaaagatggcctcgccatgggcaaggagatgccccacttgcagtatggcaaagagtatccacacctaccccaatatatgaaggaaattcaaccggcgccaagaatgggcaaggaagccgttcccaagaaaggcaaagaaataccattagccagtttacgaggggaacaaggtccccgtggagagcctggcccaagaggaccacctgggccccctggtttaccaggtcatgggatacctggaattaaaggaaaaccagggccacagggatatccaggagttggaaagccaggtatgcctggaatgccagggaagccaggagccatgggcatgcctggggcaaaaggagaaattggacagaaaggggaaattgggcctatggggatcccaggaccacaaggacctccagggcctcatggacttcctggcattgggaagccaggtgggccagggttaccagggcaaccaggaccaaagggtgatcgaggacccaaaggactaccaggacctcaaggccttcggggtcctaaaggagacaagggcttcgggatgccaggtgcgccaggtgtaaaggggcctccagggatgcacggcctccccggccctgttggactgccaggagtgggcaaaccaggagtgacaggcttccctgggccccagggccccctgggaaagccaggggctccaggagaacccggtcgacaaggccctattggggtaccgggggttcaaggacctcctgggatacccggaattggaaagccaggccaggatgggatcccaggccagccaggatttccaggtggcaaaggggagcaaggactgccagggctaccaggggccccaggccttccagggattgggaaaccaggcttcccaggacccaaaggtgaccggggcatgggaggtgttcctggggctcttggaccaagaggggagaaaggaccaataggttccccaggaatagggggttctccaggagagccaggcctgcctggaatcccaggtcctatgggccctccaggtgctattggttttcctggacccaaaggagaaggtgggattgtagggccacaggggccaccaggtcccaagggtgagccagggcttcaaggcttcccaggaaagccaggtttccttggtgaagtagggcctcctggcatgaggggtttcccaggtcccataggccccaagggggaacatgggcaaaaaggtgtaccaggactccctggtgttccagggcttctcggacctaagggagaaccaggaatcccaggggatcagggtttacagggccccccaggtatcccagggattgggggccctagtggccccattggaccacctgggattccaggccccaaaggggagcctggcctcccagggccccctgggttccctggtatagggaaacccggagtggcaggacttcatggccccccagggaagcctggtgcccttggtcctcaaggccagcctggccttccaggacccccaggccctccaggacctccaggacccccagctgtgatgccccctacaccaccaccccagggagagtatctgccagatatggggctgggaattgatggcgtgaaacccccccatgctacgggggctaagaaaggcaagaatggagggccagcctatgagatgcctgcatttaccgccgagctaaccgcaccctttccaccggtggggggcccagtgaagtttaacaaactgctgtataacggcagacagaactacaacccgcagacaggcatcttcacctgtgaggtccctggtgtctactactttgcataccacgttcactgcaagggggggaacgtgtgggttgctctattcaagaacaacgagcccgtgatgtacacgtacgacgagtacaaaaagggcttcctggaccaggcatctgggagtgcagtgctgctgctcaggcccggagaccgggtgttcctccagatgccctcagaacaggctgcaggactgtatgccgggcagtatgtccactcctccttttcaggatatttattgtatcccatgtaa

SEQ ID NO: 309 - DNA, 2846 bp, Homo sapiens; identical to SEQ ID NO: 303

SEQ ID NO: 310 - DNA, 2212 bp, Homo sapiens
tgccggctgctcctcgaccaggcctccttctcaacctcagcccgcggcgccgacccttccggcaccctcccgccccgtctcgtactgtcgccgtcaccgccgcggctccggccctggccccgatggctctgtgcaacggagactccaagctggagaatgctggaggagaccttaaggatggccaccaccactatgaaggagctgttgtcattctggatgctggtgctcagtacgggaaagtcatagaccgaagagtgagggaactgttcgtgcagtctgaaattttccccttggaaacaccagcatttgctataaaggaacaaggattccgtgctattatcatctctggaggacctaattctgtgtatgctgaagatgctccctggtttgatccagcaatattcactattggcaagcctgttcttggaatttgctatggtatgcagatgatgaataaggtatttggaggtactgtgcacaaaaaaagtgtcagagaagatggagttttcaacattagtgtggataatacatgttcattattcaggggccttcagaaggaagaagttgttttgcttacacatggagatagtgtagacaaagtagctgatggattcaaggttgtggcacgttctggaaacatagtagcaggcatagcaaatgaatctaaaaagttatatggagcacagttccaccctgaagttggccttacagaaaatggaaaagtaatactgaagaatttcctttatgatatagctggatgcagtggaaccttcaccgtgcagaacagagaacttgagtgtattcgagagatcaaagagagagtaggcacgtcaaaagttttggttttactcagtggtggagtagactcaacagtttgtacagctttgctaaatcgtgctttgaaccaagaacaagtcattgctgtgcacattgataatggctttatgagaaaacgagaaagccagtctgttgaagaggccctcaaaaagcttggaattcaggtcaaagtgataaatgctgctcattctttctacaatggaacaacaaccctaccaatatcagatgaagatagaaccccacggaaaagaattagcaaaacgttaaatatgaccacaagtcctgaagagaaaagaaaaatcattggggatacttttgttaagattgccaatgaagtaattggagaaatgaacttgaaaccagaggaggttttccttgcccaaggtactttacggcctgatctaattgaaagtgcatcccttgttgcaagtggcaaagctgaactcatcaaaacccatcacaatgacacagagctcatcagaaagttgagagaggagggaaaagtaatagaacctctgaaagattttcataaagatgaagtgagaattttgggcagagaacttggacttccagaagagttagtttccaggcatccatttccaggtcctggcctggcaatcagagtaatatgtgctgaagaaccttatatttgtaaggactttcctgaaaccaacaatattttgaaaatagtagctgatttttctgcaagtgttaaaaagccacataccctattacagagagtcaaagcctgcacaacagaagaggatcaggagaagctgatgcaaattaccagtctgcattcactgaatgccttcttgctgccaattaaaactgtaggtgtgcagggtgactgtcgttcctacagttacgtgtgtggaatctccagtaaagatgaacctgactgggaatcacttatttttctggctaggcttatacctcgcatgtgtcacaacgttaacagagttgtttatatatttggcccaccagttaaagaacctcctacagatgttactcccactttcttgacaacaggggtgctcagtactttacgccaagctgattttgaggcccataacattctcagggagtctgggtatgctgggaaaatcagccagatgccggtgattttgacaccattacattttgatcgggacccacttcaaaagcagccttcatgccagagatctgtggttattcgaacctttattactagtgacttcatgactggtatacctgcaacacctggcaatgagatccctgtagaggtggtattaaagatggtcactgagattaagaagattcctggtatttctcgaattatgtatgacttaacatcaaagcccccaggaactactgagtgggagtaataaacttc

SEQ ID NO: 311 - DNA, 321 bp, Homo sapiens
tgaattttctgactcttcctttcagacccccccaagacacacgtgacccaccaccctgtctttgactatgaggccaccctgaggtgctgggccctgggcttctaccctgcggagatcatactgacctggcagcgggatggggaggaccagacccaggacgtggagctcgtggagaccaggcctgcaggggatggaaccttccagaagtgggcagctgtggtggtgccttctggagaggagcagagatacacgtgccatgtgcagcatgaggggctgccggagcccctcatgctgagatggagtaaggagggagatggaggc

SEQ ID NO: 312 - DNA, 930 bp, Homo sapiens
attttttaaattattaggtgtgggcagaagaaaaagctagtgatcaacagtggcaatggagctgtggaggacagaaagccaagtggactcaacggagaggccagcaagtctcaggaaatggtgcatttggtgaacaaggagtcgtcagaaactccagaccagtttatgacagctgatgagacaaggaacctgcagaatgtggacatgaagattggggtgtaacacctacaccattatcttggaaagaaacaaccgttggaaacataaccattacagggagctgggacacttaacagatgcaatgtgctactgattgtttcattgcgaatcttttttagcataaaattttctactctttttgttttttgtgttttgttctttaaagtcaggtccaatttgtaaaaacagcattgctttctgaaattagggcccaattaataatcagcaagaatttgatcgttccagttcccacttggaggcctttcatccctcgggtgtgctatggatggcttctaacaaaaactacacatatgtattcctgatcgccaacctttcccccaccagctaaggacatttcccagggttaatagggcctggtccctgggaggaaatttgaatgggtccattttgcccttccatagcctaatccctgggcattgttttccactgaggttgggggttggggtgtactagttacatatcttcaacagaccccctctagaaatttttcagatgcttctgggagacacccaaagggtgaagctatttatctgtagtaaactatttatctgtgtttttgaaatattaaaccctggatcagtcctttgatcagtataattttttaaagttactttgtcagaggcacaaaagggtttaaactgattcataataaatatctgtacttcttcgatcttcaccttttgtgctgtg

SEQ ID NO: 313 - DNA, 2627 bp, Homo sapiens
ctctaaaggccgcgggccggcggctgaggccaccccggcggcggctggagagcgaggaggagcgggtggccccgcgctgcgcccgccctcgcctcacctggcgcaggtggacacctgccgaggtgtgtgccctccggcccctgaagcatggccagcagcggcatggctgacagcgccaaccacctgcccttctttttcggcaacatcacccgggaggaggcagaagattacctggtccaggggggcatgagtgatgggctttatttgctgcgccagagccgcaactacctgggtggcttcgccctgtccgtggcccacgggaggaaggcacaccactacaccatcgagcgggagctgaatggcacctacgccatcgccggtggcaggacccatgccagccccgccgacctctgccactaccactcccaggagtctgatggcctggtctgcctcctcaagaagcccttcaaccggccccaaggggtgcagcccaagactgggccctttgaggatttgaaggaaaacctcatcagggaatatgtgaagcagacatggaacctgcagggtcaggctctggagcaggccatcatcagtcagaagcctcagctggagaagctgatcgctaccacagcccatgaaaaaatgccttggttccatggaaaaatctctcgggaagaatctgagcaaattgtcctgataggatcaaagacaaatggaaagttcctgatccgagccagagacaacaacggctcctacgccctgtgcctgctgcacgaagggaaggtgctgcactatcgcatcgacaaagacaagacagggaagctctccatccccgagggaaagaagttcgacacgctctggcagctagtcgagcattattcttataaagcagatggtttgttaagagttcttactgtcccatgtcaaaaaatcggcacacagggaaatgttaattttggaggccgtccacaacttccaggttcccatcctgcgacttggtcagcgggtggaataatctcaagaatcaaatcatactccttcccaaagcctggccacagaaagtcctcccctgcccaagggaaccggcaagagagtactgtgtcattcaatccgtatgagccagaacttgcaccctgggctgcagacaaaggcccccagagagaagccctacccatggacacagaggtgtacgagagcccctacgcggaccccgaggagatcaggcccaaggaggtttacctggaccgaaagctgctgacgctggaagacaaagaactgggctctggtaattttggaactgtgaaaaagggctactaccaaatgaaaaaagttgtgaaaaccgtggctgtgaaaatactgaaaaacgaggccaatgaccccgctcttaaagatgagttattagcagaagcaaatgtcatgcagcagctggacaacccgtacatcgtgcggatgatcgggatatgcgaggccgagtcctggatgctggttatggagatggcagaacttggtcccctcaataagtatttgcagcagaacagacatgtcaaggataagaacatcatagaactggttcatcaggtttccatgggcatgaagtacttggaggagagcaattttgtgcacagagatctggctgcaagaaatgtgttgctagttacccaacattacgccaagatcagtgatttcggactttccaaagcactgcgtgctgatgaaaactactacaaggcccagacccatggaaagtggcctgtcaagtggtacgctccggaatgcatcaactactacaagttctccagcaaaagcgatgtctggagctttggagtgttgatgtgggaagcattctcctatgggcagaagccatatcgagggatgaaaggaagtgaagtcaccgctatgttagagaaaggagagcggatggggtgccctgcagggtgtccaagagagatgtacgatctcatgaatctgtgctggacatacgatgtggaaaacaggcccggattcgcagcagtggaactgcggctgcgcaattactactatgacgtggtgaactaaccgctcccgcacctgtcggtggctgcctttgatcacaggagcaatcacaggaaaatgtatccagaggaattgattgtcagccacctccctctgccagtcgggagagccaggcttggatggaacatgcccacaacttgtcacccaaagcctgtcccaggactcaccctccacaaagcaaaggcagtcccgggagaaaagacggatggcaggatccaaggggctagctggatttgtttgttttcttgtctgtgtgattttcatacaggttatttttacgatctgtttccaaatccctttcatgtctttccacttctctgggtcccggggtgcatttgttactcatcgggcccagggacattgcagagtggcctagagcactctcaccccaagcggccttttccaaatgcccaaggatgccttagcatgtgactcctgaaggaaggcaaaggcagaggaatttggctgcttctacggccatgagactgatccctggccactgaaaagctttcctgacaataaaaatgttttgaggctttaaaaagaaaaaaaaaaaaaaaaaaaaaaaaaaaaaa

SEQ ID NO: 314 - DNA, 1515 bp, Homo sapiens
ttttttttttttttcatcaggtcagagccaaaggaaagcttgaaaaatgaagacattagcaggacttgttctgggacttgtcatcttggatgctgctgtgactgccccaactctagagtccatcaactatgactcagaaacctatgatgccaccttagaagacctggataatttgtacaactatgaaaacatacctgttgataaagttgagattgaaatagccacagtaatgccttcagggaacagagagctcctcactccacccccacagcctgagaaggcccaggaagaggaagaggaggaggaatctactcccaggctgattgatggctcttctccccaggagcctgaattcacaggggttctggggccacacacaaatgaagactttccaacctgtctttggtgtacttgtataagtaccaccgtgtactgtgatgaccatgaacttgatgctattcctccgctgccaaagaacaccgcttatttctattcccgctttaacagaattaaaaagatcaacaaaaatgactttgcaagcctaagtgatttaaaaaggattgatctgacatcaaatttaatatctgagattgatgaagatgcattccgaaaactgcctcaacttcgagagcttgtcctgcgtgacaacaaaataaggcagctcccagaattgccaaccacttcgacatttattgatattagcaacaatagacttggaaggaaagggataaagcaagaagcatttaaagacatgtatgatctccatcatctgtacctcactgataacaacttggaccacatccctctgccactcccagaaaatctacgagcccttcacctccagaataacaacattctggaaatgcacgaagatacgttctgcaatggtaaaaatttgacttatattcgtaaggcactagaggacattcgattggatggaaaccctattaatctcagcaaaactccacaagcatacatgtgtctacctcgtctgcctgttgggagccttgtctaatttcagataatggttagcattacgatggctactataaataaaccattcttactgctctcttccaaaacaaaactcagcatgatactttgagattgtgttctgagagatgatatgactacataaaatacaattaaaaatgttataatataatgaaaatgtagtaatttaagaaaacaccagatgagttaggaataaacctataacatttacaaaaagagcaaaactaagtgatagaaaatatttcacacatgttcttatagatcatgtatcacttgcaagttttaggagttcatatcctatatcatttcaaattaagtacataataaagtaaaattttgaaatgaacactttaggtatttttgccaagatttagatgtttttaattaaacttttctcttcctttttttttcactaaggcatgtttattcccctaatccattaaagagcatgaaaaaaagaataaatgtatttgaaaaaaaaaaaaaaaaaaaaaaaaaaaa

SEQ ID NO: 315 - DNA, 576 bp, Homo sapiens
  misc_feature: n=a,t,g or c
aacaaaacaaaactcagaaatgttacagaatcagagtattaaaaaatgtacaagtgtatatgcttcccagacacacatggatacatttttcctccacattttcaccatggcagtattaagtagtgagtgtgaatgacacagcatgaaactggttactgaatcagctatgagctcagatggcctcaacatacatactcnagaaatgttgcctgtttaaataactgagagtgtgctaaatctcatctaaaaaaaaggnggagaggggctggggaactcaggccacagtcatgaaaggatgaataccatttccaggtttaataggttcaccatatcgaagtctttgagaatccnatatggaatatccattattttgccaaaggtagagaaagccgttcccaacttttggccaattggaattccgtggaaaaacccnggtggtatataatnccaattaatagtcncgatttccatgcctaccaaaccaccggaaggggtactcgtgagcatctcacggttaagtcngaatgatcgttcncacacgtctgatttccagagttcacagcaggtgcagcccca

SEQ ID NO: 316 - DNA, 470 bp, Homo sapiens
taggttatttaatttttttgtcagaagtagctataaaaaagccatatgtttcagagagaaattaccctgtattttgccatctctcatttttcagggcaccaaagctgcatgccccccagcagttagaagggcaagattgcattgaaggggtttcagacctctgaagtagtcagttttctcccatgtcttctatggtttaattgtaacataggtagtatgccttcacactggatcccgggggcatgggttttggagatgttattttgtggtgaattgtcatctgcagtattaaagggaagacatattcctgcacatcaccataccttgtttttaaagccagagtcattgtatgatttttattaccagaagtgctaacccggaatgtgatctggttaccttggaaaatgcaggaacttttatgaatgtactgtaaaataaaatgtgggctaattcccagaaactgaaaaaaa

SEQ ID NO: 317 - DNA, 351 bp, Homo sapiens
caggaccgggcccgagcggaagaccttaatagccgagtctcttactggtctgttggcgagacgattgccctgttcgtggtcagcttcagtcaggtgctactgttgaaaagcttcttcacagaaaaacgacccatcagcagggcagtccactcctagccccggcatcctgctctagggcccctcatgcccaggctggagcagctctcctaggtcacagcctcctggctgggtcgcgtacccagggtggaggcagacgatgcttcctgtggtagcctttgcctttcatgccatcttgattcttgcactcagcagctaaggtctaagaccagtatcagaaggatccactcatta

SEQ ID NO: 318 - DNA, 600 bp, Homo sapiens
  misc_feature: n=a,t,g or c
tttaccaaaactagctttaatttgtccaaaagccacacagagttgtgtagaaactgatcctgggagggaagctgagagagtccatgatgcgcagggccaaggtgcctctagaagttctccagcaagcccaggatgcgcttttgctcgttctcccggaactccgggctccggccgtccccgatgttctctgcatactccttgatgatatgcctgacaattttgatggagcttcctcgcatgtttaggatctggtgaaccctctggcgaatctgggggacattggcattgcagatctcggccatgatgtagcagatgtgctggagaacaaagagccccgcatccaggcgccggagtagaactcctcctcggtgtcattgtcgatgatctctcctcgccggaccatgtcgtgtttttccccttcaatcttcttgtccgccacctgcattgcacccagatatttaaaatgcaactccattagtctgtcaaccttctcactgtcattttcagtgaatttattcagaagccgggtccgctgctgcctctcaggttccgcagaggggaagccaggatcgaacagacatgtcttcatgtttntttttt

SEQ ID NO: 319 - DNA, 475 bp, Homo sapiens
  misc_feature: n=a,t,g or c
annttcggcacctgggaaaaaggagagcatcttggacttgtcaagttacatcgacanngacgatccgggtaaagttccagggaggccgcgancagntggaatcctgaagggcttcgacccactcctcaaccttgtgctggacggcaccattgagtacatgcgagaccctgacgaccagtacaagctcacggaggacacccggcagctgggcctcgtggtgtgccggggcagtccggtggtgctaatctgcccgcaggacggcatggaggccatccccaaccccttcatccagcagcaggacgcctagcctggccggggngcggggggtgcagggcagncccgagcagctcggtttcccgcggacttggctgctgctcccaccgcagtaccgcctcctggaacggaagcattttcctttttgtaaaaggtttgaatttttgttttccttaataaaanttgcaaaccttcaaaaaaa

SEQ ID NO: 320 - DNA, 259 bp, Homo sapiens
aaaaaacacaaaaccctagacataataaatgcctgttttctacaaaaacaatgtctaactctgggtggactgatctcttctcaacagcccagggcagggctggtccctcattcacctgtgtccacagggccgaagacactgcacacactaggacaggatttgattgagtttaaatcctgccaccaccagggaggagtacttctagagcgcccggggccatcgattttcacccgggtgggtacaggtaagtgtaccattg

SEQ ID NO: 321 - DNA, 413 bp, Homo sapiens
cttgactgcgctcgtttcctcctttctaaagtgagcataccacacagggttctgaggattaaagctaaagtgtatacatcaaacagctctattgctatccctttgcataaatggtggctgctattaaggataaaacttggtaaaaggcaagagctgtttgaatctgaagttttgttttttttttttaacacaaatgagaaaaggagaaaccctgaacttacctagcttttcctctacatggagaaaatatttaattttcttgttaacagtttctcttctcttctgactctgtgatgcttattcttcattttattgaatagttataatgaaattcaaattgctagctttaaccccacttttactttttctgggattttatattcagtattaattatttaaattagcatcctttt

SEQ ID NO: 322 - DNA, 481 bp, Homo sapiens
ataaatggtttatttttaacataagtaaatttacaaatcaaatgaaaaatgaaaaatacaaaagttcatgaatgaaataaaaaagacactctcaaaatattaaaacctatggaaagaaaataagtaattaatgaatgatgtttttgtttccaaatacaatgaagtgattttttattagagtccttgggaatcatctaagttacaatacagaagagaattaaataaatcgtatatgattttgtaattagacactctatatatcacagttctttgttaacctgggcatggaacgtccctatagcatatatttaaaaccattaattttttttaaaaaaatttgagacatggtttgttcttgttctctaaattatgtttccccatttcccttgaatgttctctattggccatcttctggaacattaaaaaaaaatcttgaaacaaattctcttgcaatgatacgtatcacataaacttgatatgc

SEQ ID NO: 323 - DNA, 513 bp, Homo sapiens
ctggctttgctggcgaactcctgcacacccttcaaggccctgttcaaatgtctctgtcttaggctgacgcagctgctgcccttctgtggccatacagtgctccttttcacagatgatggctcctgcagggagtgcccccagtgcccagcacagggccaggcacacagtggtgcacgggaacgtctgctgatgcccaccctaaggccaatcaaggagccacggggctgggtcctggtcctcacatcctcttccgcatcttgcccttcttggagcgggcaccccggccgaacgccctgctgcagctcctggacgcggcggcggttgcgggcagagagctgcttgaggccaccacgctgcaggaagtgcagcttctgggcccggcgccgctgcttcaggatctgctgcttggtcttgagttccgggcggactcggcctgcaggggtgcctggggcgtggggccgggatgcaccttggccacggtctcgcttcccacctcttcgctctgggcctcgc

SEQ ID NO: 324 - DNA, 514 bp, Homo sapiens
caatatggaaatttcagaaggacagaggtgaggagggaggaagaagaaagtatactcctccagaatttcagtgatctgttgtggcagtccagtggaaggaaggtcttttgaggtcacttagaagcatctttttgggacatccttttgggatcttttgtaggctaggcatctcatatcttgagactcacccccagcctccaagcctctctccatttctctaacctatgcattttagagcgagaggaccgcctcactagtgtcaccatcctgccttttctaaaacatgcaggctcacacattctactcctgcttaatgtctgtgttaaacgttttctaaccatttttgttttatttttctgaaaaagttaacccctcccaactcctcacacattggctcttcctcttgagccacaaagttttgattcttgcgatgtatgtgccttattttatgttaatcttgtcaatgagagggaccagttggtgttgcccaatcagcactccaaggctgtgtgtg

SEQ ID NO: 325 - DNA, 581 bp, Homo sapiens
  misc_feature: n=a,t,g or c
ggnaatgggaaaaggacagcacaggatgccctccaaggatgagctggtccagagatacaacaggatgaataccatcccccagacccgatccattcagtcacggttcctgcagagtcggaatctaaactgtatagcactttgtgaagtgattacatctaaggacctccagaagcatgggaacatctgggtgtgccctgtgtccgaccatgtctgcacaagattcttctttgtatatgaggatggtcaggtgggcgatgcaacattaatactcaggaccccaagatacagaaggaaatcatgcgtgtgatcggaactcaggtttacacaaactgagggggccccagcctcggtaccacccctgttaccccaggatccatctgccctcataaaagtgttcaggtacagcagctgaggctgncctgaggaatcaaggggccattaccaaggggcaggaaaaggatatgtaagaggtggccttcatggtagagcttgacccaagaactactccacattcggatggcccagactgactccatcccctgactttccctttgacttcaccctgtttgtaaataaaacaa

SEQ ID NO: 326 - DNA, 559 bp, Homo sapiens
acgaaattcggcagaggatttggtgttaagaacttgaaattgcatcccatatttggaaacccatgatccatccatcctagggctctcacttaataaccccagcatccatttatttagcactctctatactctgcaaagtgctctacatacataattttaattaatccccacagccttatgaggtaagtatcatactaattttccagatgggggactgaggttcagagagattatttttcctaaatcacacagaaactatgtatcttagaactggagtttgaacctaggtttctgacttctacattcctgtactccacctatcaagaagtacaaagaagggccttttcagcctagaaacacatgtgataaagctcctatgagattgtgctccttgttcatctgtcatctgctgtgctggtaaggtggctagtaatagtgggtacccaattaacatgctgaataatgtgaaaacgtgagtgaaaaacaaaactttatttaaatggttgattcagaatgatgttttagaaataaatattaaatgctgttatgttttgatttt

SEQ ID NO: 327 - DNA, 282 bp, Homo sapiens
  misc_feature: n=a,t,g or c
ctctncctcagcatngngacaggggcttccccttcgccgccgccgtcgncggcggncaagntccgncgcgcccgngtcctgcggncctattgcagtttatgttnctttttagtcgtcagggaaagcttcgactgcaaaaatggtatgtcccactatcagacaaagagaagaaaaagatcacaagagaactnnttcagaccgttttagcacggaaacctaaaatntgcagcttccttgagtggcgagatctgaagattgtttacaaaagatatgctagtctgt

SEQ ID NO: 328 - DNA, 1747 bp, Homo sapiens
cctctagccctccctgcgtttagattcagttgcaccttttattattttaactcttctccttaggacacgcagcccccaatttgtccctccgcctgggcggcccctggtcccgcgcgccagcatgggagagcgagggacctgcccgcggcccgccggcgtgtgcaaggaggtccagccgccgcgcccgctacccggagtctgaggacgggtgtccagggacggagaggcaggtgagagggaggtggctaagctggctatggtgacaggacgatgttggccagaaagagtatcatcccggaggagtatgtgctggcgcgcatcgccgcagagaacctgcgcaagccgcgcatccgagaccgcctccccaaagcccgcttcatcgccaagagcggggcctgcaacctggcgcataagaacatccgtgagcaaggacgctttctacaggacatcttcaccaccttggtggacctgaaatggcgccacacgctggtcatctttaccatgtccttcctctgcagctggctgctcttcgctatcatgtggtggctggtggcctttgcccatggggacatctatgcttacatggagaaaagtggaatggagaaaagtggtttggagtccactgtgtgtgtgactaatgtcaggtctttcacttctgcttttctcttctccattgaagttcaagttaccattgggtttggagggaggatgatgacagaggaatgccctttggccatcacggttttgattctccagaatattgtgggtttgatcatcaatgcagtcatgttaggctgcattttcatgaaaacagctcaggctcacagaagggcagaaactttgattttcagccgccatgctgtgattgccgtccgaaatggcaagctgtgcttcatgttccgagtgggtgacctgaggaaaagcatgatcattagtgcctctgtgcgcatccaggtggtcaagaaaacaactacacctgaaggggaggtggttcctattcaccaactggacattcctgttgataacccaatcgagagcaataacatttttctggtggcccctttgatcatctgccacgtgattgacaagcgcagtcccctgtatgacatctcagcaactgacctggccaaccaagacttggaggtcatagttattctggaaggagtggttgaaactactggcatcaccacacaagcacgaacctcctacattgctgaggagatccaatggggccaccgctttgtgtccattgtgactgaggaagaaggagtgtattctgtggattactccaaatttggcaacactgttaaagtagctgctccacggtgcagtgcccgagagctggatgagaaaccttccatccttattcagaccctccaaaagagtgaactgtctcatcaaaattctctgaggaagcgcaactccatgagaagaaacaattccatgaggaggaacaattctatccgaaggaacaattcttccctcatggtaccaaaggtgcaatttatgactccagaaggaaatcaaaacacatcggaatcatgacagcaagataaccccaagacagtcttttatcaagttttgacggtttatgctgggcactgccagactgaaccagagctggaacacaataatgtgtccttctacattttattacactaaatgatattcatattcaagcaacagcactttctgtagtaataaaaagtaacacaccaagtggaggattcatggcttatgcttgttt

SEQ ID NO: 329 - DNA, 216 bp, Homo sapiens
gaaagactatgtattcccttttttaattccgtactggtatttgtgttatttaaaaagcaaaattctgctctatttagttgtataatattagaggatactttgctgtgcacaattccaagtgccttagaacattgtttagctttcctaagtatatataaatgcatatatgtataaaattgggaaaagttacctcaataaaatcattgggaaatcccc

SEQ ID NO: 330 - DNA, 448 bp, Homo sapiens
  misc_feature: n=a,t,g or c
gtgtgtgtatatatagcattgtatttaatcatagactaaatttaatttgatatagaaatactactttacttgtacattaaggtcataatttctgctggactcttttatatttaattaatggggattatagtcttccttcataaatgcatttaaacctgaaattgaacaccagtgtttttctttttctacttatgggaagttgtctgcttccccctttagagaaaacagtatttttatattttgttaaaatattaactactttatgcctacacactatgctgtaggatactgatcataattcttggggtgttcacaaacactcctagtgcctcttttttgggcccgttggaaagtgttgggtattactactttccactacagagcctttggnccctcttaataatgcngagggtgggctggatccntccccnttctgtcctcngggttt

SEQ ID NO: 331 - DNA, 3150 bp, Homo sapiens
ttcaacctggacgtggaaaagctcgcagtgtacagcggccccaagggcagctacttcggctacgccgtggacttccacatacccgacgcccgcacagcgagtgtcttggtgggggcgcccaaagccaacaccagccagcccgatatcgtggaagggggagccgtctattactgtccttggcccgcggaggggtctgcgcagtgcaggcagataccgtttgacaccaccaacaacagaaagatcagagttaatggaaccaaagaacctatcgagttcaaatccaatcagtggtttggagcaacagtgaaagctcacaaaggaaaagttgtggcctgtgctcctttatatcactggagaactcttaaaccgacaccagaaaaaggaccagttggcacctgctatgtagcaattcagaacttcagcgcttatgccgagttctctccttgcggaaacagcaatgctgatccggaaggccagggttactgccaagcaggatttagtctggatttttataagaatggagaccttattgtgggaggacctgggagtttctactggcaaggacaagtgatcactgccagtgttgcagatatcattgcaaattactcattcaaggatatcctcaggaaactggcaggagaaaagcagacggaagtggctccagcttcctatgatgacagttaccttggatactcagttgctgctggggagtttactggggattctcagcaagaattggttgctggaattccaagaggagcacagaattttggatatgtttccatcattaactcctacgatatgacgtttattcagaatttcacgggagaacagatggcatcttattttggatataccgttgtcgtatcagatgttaacagtgatggactggatgatgtcctggttggggcacctctctttatggaacgtgaatttgagagcaaccccagagaagtagggcaaatctacctgtatttgcaagtgagctctctcctcttcagagacccccagatcctcactggcaccgagacgtttgggagattcggtagtgctatggcacacttaggagacctgaaccaagatggctacaatgacattgccatcggagtgccttttgcaggcaaggatcaaagaggcaaagtgctcatttataatgggaacaaagatggcttaaacaccaagccttcccaagttctgcaaggagtgtgggcctcacatgctgtcccttccggatttggctttactttaagaggagattcagacatagacaagaatgattacccagatttgattgtgggtgcatttggaacaggaaaagtcgctgtttacagagcaagaccggttgtgactgtagatgcccagcttctgctgcacccaatgattatcaatcttgaaaataaaacttgccaggttccagactctatgacatctgctgcctgcttttctttaagagtatgtgcatctgtcacaggccagagcattgcaaacacaatagtcttgatggcagaggtgcaattagattccctgaaacagaaaggagctattaaacggacgctcttccttgataaccatcaggctcatcgcgtcttccctcttgtgataaaaaggcagaaatcccaccagtgccaggatttcatcgtttaccttcgagatgaaactgaattccgagataaattatctccaatcaacattagtttgaattacagtttggacgaatccacctttaaagaaggcctggaagtgaaaccaatattgaactactacagagaaaacattgttagtgaacaggctcacattctggtggactgtggagaagacaatctgtgtgttcctgacttgaagctgtcggctagaccagataagcatcaggtaatcattggagatgaaaatcaccttatgctcataataaatgcaagaaatgaaggggaaggagcatatgaagctgaactctttgtaatgataccagaagaggcagattatgttggaatcgaacgcaacaacaagggatttcgaccactgagctgtgagtacaagatggaaaatgtaaccaggatggtggtgtgtgaccttgggaaccctatggtgtctggaacaaattattccctgggcctccgatttgcagttccacgtcttgagaaaacaaacatgagcattaacttcgatctccaaatcagaagttccaacaaggacaatccagacagcaattttgtgagcctgcaaatcaacatcactgctgtagcgcaggtggaaataagaggagtgtcacaccctccgcagattgttctgcccattcataactgggaaccagaagaggagccccacaaagaggaggaggttggaccattggtggaacatatttatgagctgcacaatattggaccaagtaccatcagtgacaccatcctggaggtgggctggcctttctctgcccgggatgaatttcttctctatattttccatattcaaactctgggacctctgcagtgccaaccaaatcctaatatcaatccacaggatataaagcctgctgcctccccagaggacacccctgagctcagcgcctttttgcgaaactctactattcctcatcttgtcaggaagagggatgtacatgtggtcgaattccacagacagagccctgcaaaaatactgaattgtacaaatatcgagtgtttacaaatctcctgtgcagtgggacgactcgaaggaggagaaagcgcagtcctgaaagtcaggtcacgattatgggcccacaccttcctccagagaaaaaatgatccctatgctcttgcatccctggtgtcctttgaagttaagaagatgccttatacagatcagccagcaaaactcccagaaggaagcatagcaattaagacatcagttatttgggcaactccgaatgtttccttctcaatcccattatgggtaataatactagcaatacttcttggattgttggttctcgccattttaaccttagctttatggaagtgtggattctttgacagagccagacctcctcaggaggacatgaccgacagggaacagctgacaaatgacaagacccctgaggcatgacaagaaaaaaaaaagaagaccaaagacctgaaacactggtcctgttcaaagaaaaagaaagaacatgaggcc

SEQ ID NO: 332 - DNA, 920 bp, Homo sapiens
gcacggaggggcagagaccccggagccccagccccaccatgaccctcggccgccgactcgcgtgtcttttcctcgcctgtgtcctgccggccttgctgctggggggcaccgcgctggcctcggagattgtggggggccggcgagcgcggccccacgcgtggcccttcatggtgtccctgcagctgcgcggaggccacttctgcggcgccaccctgattgcgcccaacttcgtcatgtcggccgcgcactgcgtggcgaatgtaaacgtccgcgcggtgcgggtggtcctgggagcccataacctctcgcggcgggagcccacccggcaggtgttcgccgtgcagcgcatcttcgaaaacggctacgaccccgtaaacttgctcaacgacatcgtgattctccagctcaacgggtcggccaccatcaacgccaacgtgcaggtggcccagctgccggctcagggacgccgcctgggcaacggggtgcagtgcctggccatgggctggggccttctgggcaggaaccgtgggatcgccagcgtcctgcaggagctcaacgtgacggtggtgacgtccctctgccgtcgcagcaacgtctgcactctcgtgaggggccggcaggccggcgtctgtttcggggactccggcagccccttggtctgcaacgggctaatccacggaattgcctccttcgtccggggaggctgcgcctcagggctctaccccgatgcctttgccccggtggcacagtttgtaaactggatcgactctatcatccaacgctccgaggacaacccctgtccccacccccgggacccggacccggccagcaggacccactgagaagggctgcccgggtcacctcagctgcccacacccacactctccagcatctggcacaataaacattctctgttttgt

SEQ ID NO: 333 - DNA, 1584 bp, Homo sapiens
cggggcagctctgaggaacaaggtggaagctcagagcgctggtctccaccctggtgcccctgggctggtgctggcagtgggagccgtggctgtggatgagagacatagacgagagagtgagatggcctggtttgccctctacctcctgagccttctctgggctacagctgggactagtacccagacccagagttcatgctccgttccctcagcacaggagcccttggtcaatggaatacaagtactcatggagaactcggtgacttcatcagcctacccaaaccccagcatcctgattgccatgaatctggccggagcctacaacttgaaggcccagaagctcctgacttaccagctcatgtccagcgacaacaacgatctaaccattgggcacctcggcctcaccatcatggccctcacctcctcctgccgagaccctggggataaagtatccattctacaaagacaaatggagaactgggcaccttccagccccaacgctgaagcatcagccttctatgggcccagtctagcgatcttggcactgtgccagaagaactctgaggcgaccttgccgatagccgtccgctttgccaagaccctgctggccaactcctctcccttcaatgtagacacaggagcaatggcaaccttggctctgacctgtatgtacaacaagatccctgtaggttcagaggaaggttacagatccctgtttggtcaggtactaaaggatattgtggagaaaatcagcatgaagatcaaagataatggcatcattggagacatctacagtactggcctcgccatgcaggctctctctgtaacacctgagccatctaaaaaggaatggaactgcaagaagactacggatatgatactcaatgagattaagcaggggaaattccacaaccccatgtccattgctcaaatcctcccttccctgaaaggcaagacatacctagatgtgccccaggtcacttgtagtcctgatcatgaggtacaaccaactctacccagcaaccctggccctggccccacctctgcatctaacatcactgtcatatacaccataaataaccagctgaggggggttgagctgctcttcaacgagaccatcaatgttagtgtgaaaagtgggtcagtgttacttgttgtcctagaggaagcacagcgcaaaaatcctatgttcaaatttgaaaccacaatgacatcttggggccttgtcgtctcttctatcaacaatatcgcggaaaatgttaatcacaagacatactggcagtttcttagtggtgtaacacctttgaatgaaggggttgctgactacatacccttcaaccacgagcacatcacagccaatttcacacagtactaacgaagaggtgggttcagcttctatcaaacatctccaaaggatgggtgaaattttttccacttcattttaaatctatgcaaaaaagcgaatgcctgtgatgctaccatattcctggtaaaaacatggagaaccactatgtagaataaaaatgcaaagttcactggagtctcaacatctatgactcatgaaaataaaattttcatcttctc

SEQ ID NO: 334 - DNA, 566 bp, Homo sapiens
  misc_feature: n=a,t,g or c
taatctttagaacttaaattctacaagaattttaaatattttctgtatataattatgacattgtcacacagaaattacacattttatgtgccagaagccttaaacatctttctgtgaaaatgctgatatattgtgacagttatttcacatttgatatgtagagaggaataggggttagtttatgtttatattgaaaaactttaaagactatttggaagttccagaaattctggttttaattcaagtaaaatgataaaatagtcattatatagttcagatgctaatattctaagtaataatatatatttacattgaagctaaaactgttaagccaaaacaatgcccattttgtcggcttacagctcttccngagtctaggagccngttgggggttcngtcccnactttaaggnttttaattggcccacttatttccgaaaggnttggttccaaccaggtggtattaaaattggtttttcnctaaaacnactggggtatcnggcccctggggggttttttttncaatttnattaaaggccggtgnatatttgggggggccttttaaat

SEQ ID NO: 335 - DNA, 4834 bp, Homo sapiens
cgaggtcagaggggaggaggactctggagctgacagcgcgcacttcacccgcagttgttctagcgactgcgaagatagctcgctgagctggaaccccacagatcaccaacaaaaatgaaggcggcagatgagcctgcctacctgacagtgggaaccgatgtcagtgccaagtaccgaggtgccttctgtgaggcaaagattaagactgtgaaaaggctggtgaaagttaaggtactcctgaaacaggataataccacacaattggtacaagatgaccaagtaaagggtcctttaagagttggagctattgttgaaacaaggacatctgatggatcttttcaggaagctattatcagcaagttgacagatgctagttggtataccgtggtgtttgatgatggtgatgagcgaacattgagacgtacctcactttgtctgaaaggagagagacattttgcagagagtgagacacttgaccagcttccattaacaaatccagagcattttggaactccagtaattgcaaagaagacgaacagaggaaggagatcttctcttcctgttactgaagatgaaaaggaagaagaaagcagtgaagaggaagatgaagacaagcgccgtctcaatgatgaattactaggaaaagttgtaagtgtggtgtctgcaacggagaggactgaatggtatcctgctttggtaatatctcccagctgtaatgatgacatcacagtgaaaaaggatcagtgtttagttcgatcatttattgattctaaattttactctatagcaagaaaggacattaaggaagtagacattctcaatctaccggaatctgagctctccactaaaccagggcttcagaaagcaagcatcttcttaaaaactagagttgttcctgataattggaaaatggatataagtgaaatccttgagtcatccagtagtgatgatgaagatggcccagctgaagaaaatgatgaagagaaggaaaaggaggccaaaaagacagaagaagaggtgcctgaggaagaacttgatcctgaagagagggacaacttcctccagcagctttataagtttatggaagacagaggtactccaatcaacaaaccacctgttttgggctataaagatctcaatctcttcaaactcttcagactggtttatcatcagggtggatgtgacaatattgatagtggtgctgtatggaagcaaatttatatggaccttggcattcctattttgaattcagctgcttcctacaatctaaaaactgcttatagaaagtatctctatggttttgaggagtactgccgttcggcaaatattcagttcagaactgttcatcaccatgaaccaaaagtaaaagaggaaaaaaaagacttagaagaatcaatggaagaggctctcaaattagatcaagaaatgcctttaacagaagtgaagagtgaacctgaggaaaatatcgattcaaacagtgaaagtgaaagagaagagatagaattaaaatctccgaggggacgaaggagaattgctcgagatgtaaattctattaaaaaggaaattgaagaagagaaaacagaagacaaattaaaagataatgatacagaaaataaggatgtagatgatgactatgaaactgcagagaaaaaagaaaatgagctactactggggagaaaaaatacaccaaagcaaaaagagaagaaaattaaaaaacaggaggattctgacaaagactcagatgaagaggaagagaaaagccaagagagggaagaaactgaaagcaaatgtgactctgaaggagaggaagatgaggaagacatggaaccctgcctaacaggaaccaaagtgaaagtaaaatatggacgagggaagacgcagaaaatttatgaagccagtattaaaagcactgaaattgatgacggagaagttttatatttggtacattactatggatggaatgtcagttatgatgagtgggtgaaggctgacaggataatctggcctttggacaaaggtggaccaaagaaaaaacagaagaaaaaagctaaaaataaagaagatagtgaaaaggacgaaaagagagatgaggagaggcagaagtcaaaacggggacgacctcctttaaaatcaaccctctcatcaaacatgccgtatggcttatctaagacagcaaacagtgaaggaaaatcagactcttgttcatctgatagtgaaacagaagatgctttagaaaagaatttaataaatgaagaactttctcttaaagatgaactagaaaaaaatgaaaatttgaatgatgataagctagatgaagaaaatccaaagatttctgcacatatattaaaagaaaatgataggactcaaatgcagcctttagaaaccctgaagttagaagttggagagaatgaacaaatagtacagatttttgggaacaaaatggaaaaagcagaagaagttaagaaagaagccgaaaaatctccaaaaggaaagggaagacgaagcaagacaaaagatctttctttagaaattataaagatttcatcatttggccagaatgaagcaggaagtgaacctcatatagaagctcatagtcttgaattgtcttcattagacaataaaaacttttcttctgctacagaagatgaaattgaccaatgtgtgaaagaaaagaagttgaaacggaaaatactaggacaatcatcgccagagaaaaaaataagaattgagaatggaatggaaatgacaaatactgtatctcaagaaaggaccagtgattgtattggatctgagggaatgaaaaacttaaattttgaacagcactttgaaagagaaaatgaaggaatgccatcattgatagcagagtcaaaccaatgcatccaacaactgactagtgaaagatttgatagtccagctgaagaaactgtaaatattccactaaaagaagatgaggatgcaatgcctctgatcgggcctgaaaccttggtttgccatgaagtagatttggatgatttggatgaaaaggataagaccagcattgaggatgtagcagttgaaagctctgagtctaactctcttgtttctattccacctgccctacctcctgtagtccaacataacttttcagtagcttcaccacttactcttagtcaagatgagtctcgaagcgtaaaaagtgagagtgatataacgattgaagttgatagtattgctgaagaatctcaagaaggtctctgtgagagggaatcggcaaatggatttgaaactaatgttgcctctggtacctgtagtataattgtacaagagagagagagcagagagaagggtcagaagaggccaagtgatggaaatagtggattaatggcaaaaaagcaaaagcgtaccccaaagcgaacaagtgctgcagccaaaaatgaaaagaatggaacaggacaaagcagtgatagtgaagatctccctgtcctagacaattcaagtaaatgtaccccagtaaagcatcttaatgtatctaagccacagaaacttgcacgatctcctgcaagaatatccccgcacatcaaagatggagagaaagataaacacagagaaaaacatccgaattcatcccctaggacatataaatggagctttcagctcaatgaattagataatatgaacagtacagagagaatctcatttctccaagaaaaactacaggaaatcagaaaatattatatgtctttgaagtctgaagttgcaaccatagacaggaggagaaaaagattaaaaaagaaagacagggaagtgtctcatgcgggagcctccatgtcatctgcttcatcagacactggaatgagtccctcatcatcatctcccccacaaaatgtacttgctgtagaatgcaggtgataaacattttctctaccttcccagcagtttgctgccatggacataaatccccaaaccctgaattacaaccacagaaagcactcaactggtttgacattgctaagtatatcctgtatacttttccaggctggattgtatctattcccctctctcttcttttttcttgttgcaaaaaataagctgattaataagtgaaggttaagcagcctgccatatttgtcataatttttcctctttacttttgtttttcgtttgttgtgatatagaacaaagggcacttagcaaatttgaatttgtataataaagctttcaggtgttacagaaatcgtagacaagcaagtgcacatgataaacaatcaaaatattacccagctgaatagttactgctgcactttcactaagatgtatttgaacacttggtgagtagggggtttatgttgtgttttttttcattatcgttttttttatttttgtgaagcacttgctatttagaactgccaaagtatatgttcagcagtgtgcccaggattgaaggtgtaaatgggacaaaataaattgtgaaaggaagtgtagttgactgaaaactacagttgtaataagtcttccactttttataggatttttgagcacacaattatgcaaatattttaatgtttattaatgtttacagtggaattgtgaataagttttcagtggactatcttatcccttgacaaaaatattttgtcttttttctatgtaatttcagagtttttattttgttacaaaaagacaaaaatgaaatatataacaacaatgaagttatttaacaagatttctaaagctgaaatttttgtgtaaaataaggtattatcttgcaacttgttaaatatatttattcagacattggatgttgtatttttatgtattttttaaaatattaataaaatttaaaaaaaaaaaaaaa

SEQ ID NO: 336 - DNA, 1023 bp, Homo sapiens
tcttgaagccagagcagcgccaggatgtcacgggagctggccccactgctgcttctcctcctctccatccacagcgccctggccatgaggatctgctccttcaacgtcaggtcctttggggaaagcaagcaggaagacaagaatgccatggatgtcattgtgaaggtcatcaaacgctgtgacatcatactcgtgatggaaatcaaggacagcaacaacaggatctgccccatactgatggagaagctgaacagaaattcaaggagaggcataacgtacaactatgtgattagctctcggcttggaagaaacacatataaagaacaatatgcctttctctacaaggaaaagctggtgtctgtgaagaggagttatcactaccatgactatcaggatggagacgcagatgtgttttccagggagccctttgtggtctggttccaatctccccacactgctgtcaaagacttcgtgattatccccctgcacaccaccccagagacatccgttaaggagatcgatgagttggttgaggtctacacggacgtgaaacaccgctggaaggcggagaatttcattttcatgggtgacttcaatgccggctgcagctacgtccccaagaaggcctggaagaacatccgcttgaggactgaccccaggtttgtttggctgatcggggaccaagaggacaccacggtgaagaagagcaccaactgtgcatatgacaggattgtgcttagaggacaagaaatcgtcagttctgttgttcccaagtcaaacagtgtttttgacttccagaaagcttacaagctgactgaagaggaggccctggatgtcagcgaccactttccagttgaatttaaactacagtcttcaagggccttcaccaacagcaaaaaatctgtcactctaaggaagaaaacaaagagcaaacgctcctagacccaagggtctcatcttattaaccatttcttgcctctaaataaaatgtctctaacagaaaaaaaaaaaaaaaaaaaaaaa

SEQ ID NO: 337 - DNA, 1346 bp, Homo sapiens
  misc_feature: n=a,t,g or c
cagacaatgaggatgaagatgaagatgtcaaagctgaaagactaaaggtcaaagagctgatgggttgccagtgttgtgaggagaaaccatccattatggtcagcaatttgcataaagaatatgatgacaagaaagattttcttctttcaagaaaagtaaagagagtggcaactaaatacatctctttctgtgtgaaaaaaggagagatcttaggactattgggtccaaatggtgctggcaaaagcacaattattaatattctggttagtgatattgaaccagcttcaggccaggtatttttaggagattattcttcagagacaagtgaagatgatgattcactgaagtgtatgggttactgtcctcagataaaccctttgtggccagatactacattgcaggaacattttgaaatttatggagctgtcaaaggaatgagtgcaagtgacatgaaagaagtcataagtcgaataacacatgcacttgatttaaaagaacatcttcagaagactgtaaagaaactacctgcnaggaatcaaacgaaagtgtgttttgctctaagtatgctagggaatcctcagattactttgctagatgaaccatctacaggtctggatcccaaatgccaaacatgcacatgtggcatgcaattcgaactgcatnnaagcgggctgctattctgaccactcactatatggaggaggcagaggctgtctgtgatcgagtagctatcatggtgtctgggcagttaagatgtatcggaacagtacaacatctaaagagtaaatttggaaaagnactttttggaaattaaattgaacggactggatagaaaacctagaagctagaccgccttcaaagagaaattcagtatattttcccaaatgcaagccgtcagaaagtttttcttctattttggcttctaaaattaataaggaagatgttcagtccctttcccaatctttttttaagctggaagaagctaaacatgctttgccattgaagaatatagctttctcaagcaacattggaacaggtttttgtagaactcactaaagaacaagaggaggaagataatagttgtggaactttaaacagcacactttggtggaacgaacacaagaagatagagtagtattttgaatttgtattgttcggtctgcttactgggacttctttctttttcacttaattttaactttggtttaaaaagttttttattggaatggtaactggagaaccaagaacgcacttgaaatttttctaagctccttaattgaaatgctgtggttgtgtgttttgcttttctttaaataaaacgtatgtataattaagtgaaaaaaaaa

SEQ ID NO: 338 - DNA, 500 bp, Homo sapiens
tgtctttttattaatggccatttggactggtgtgagatgatatctcattatggtttagatttgcatttttctgatgattagtgatggcttttctctagggtgaaggtacactcgagcgtggtcattgaggacaagtccgacgagagatcccgagtacgtctacagtcagccttacgagtggactgatcaagttgaaagcaacagaacaagcatctataagaattgattatatgtcccagcactttggaaggctgaggcaacgtggatcccttgggcctaggacttcgcgagaccagttgggcaacatgatgaactcctactaattttcgtccttcagaacaagatggaagaaactacggtcacatatgcaaatggagaagatgatgaacacagaaaaattatgcaaagataatccctaaaaccttctttctcatcaaaagttatagcaaggtggtttatatatcactgacggaacacgatgctttgtttaatgaagaccc

SEQ ID NO: 339 - DNA, 835 bp, Homo sapiens
  misc_feature: n=a,t,g or c
nnnnccccncccnnnnccnnntcttctagtttgncgattttgtcttggcttggngatggcgcggcgtncgtgttcgagttctctgcaggtcactagtttcccggtagttcagctgcacatgaatagaacagcaatgagagccagtcagntggactttgaaaattcaatgaatcaagtgaaactcttgaaaaaggatccaggaaacgaagtgaagctaaaactctacgcgctatataagcaggccactgaaggaccttgtaacatgcccaaaccaggtgtntttgacttgatcaacaaggccaaatgggacgcatggaatgcccttggcagcctgcccaaggaagctgccaggcagaactatgtggatttggtgtccagtttgagtccttcattggaatcctctagtcaggtggagcctggaacagacaggaaatcaactgggtttggaaactctggtggtgacctccgaagatggcatcacaaagatcatgttcacccggcccaannangaaaattgccataacactgagtngatccagtttggcttacatgactgcaannnnnnnnnnnnnnttnnccacnttnnntccanannnnnnnnnnnnnccncnntnncnntnccaannnnncccccncncccnntnncnccccnccnnnnnnccncncncccnnnnccnncncccncnnnnnnnnnncnncncncccnnnnncnnccncnnnnnnnncncnccncccnnnnnnnnnccnncccnncnncccnncccncncnncnccnncnnnnnnncnnnnncnnccncnnncnnnccnncccncccccnnnnncnccncnccnccc

SEQ ID NO: 340 - DNA, 351 bp, Homo sapiens
  misc_feature: n=a,t,g or c
ccactcctgggctaaggagtaacctccctcatctctaactgcccccacgcgcaagcggctaccccagaacttttaactcttccaggacagggagcttcgggcccccactctgtctcctgcccccgggggcntgtggtaagtaaaccatacctaacctaccccagtgtgggtgtgggcctctgaatataacccacacccagcgtagggggagtctgagccgggagggctcccgagtctctgccttcagctcccaaagtgggtggtgggcccccttcacgtgggacccacttcccatgctggatgggcagaagacattgcttattggagacaaattaaaaacaaaaacaacta

SEQ ID NO: 341 - DNA, 477 bp, Homo sapiens
  misc_feature: n=a,t,g or c
gaaagctgacagtctgttctttgtaaactgcctttccctgtttttctgttttgttttgtttctcaagtttcattttttactaagccccttctgacacctaggcagataaagataagagtagtgcgcagtacaaatgtcagctctgaagaggaggaagtaaatcttcaatgctagggcagatcttcactatccgtgatccagtcttaatttgagcatgagagcaaaatttagtcatctacacaagaagcaaaagcaaggaatagttgttgggtttttgttttttggttgttgtctntnttntntttttaggcaagaagtgttgccggtaggnatgtgtgctttctttgccttcctatttcctttcaaagaaatccctgtaaattcaaaactgtgaaattgggttgccaaaaactgttgncctcgttagatgcctccaacagtgtaaatcnatactgcaccatgtccacctntgggtcc

SEQ ID NO: 342 - DNA, 4080 bp, Homo sapiens
gcccatgagcgcgccgcggcccgggctggcgtgcgggtgcggctgcggcggccgcgcggcggggccccgggaggcgggtcgctgagcggggcgcgcggccccgaggatgcgggagcgggagcgggagcagcgctggcgtcaatgctcccttcctcgggccattggagactccgttgctttttaatggcggcagcggctgctgggtgagcagctggaggccggacagtgttcgtcccatccggagaggatcgctttctcctggcgtcaccagcgctgggttggtgggggtagcttttccctctttgctcctccattcttgaagaaagaagaagatgccactgccatttgggttgaaactgaaacgcacccggcgctacacggtgtccagcaagagttgcctggttgcccggatccaactgcttaataacgagtttgtggagttcaccctgtccgtggagagcactggccaggaaagcctcgaggccgtggcccagaggctggagctgcgggaggtcacttacttcagcctctggtactacaacaagcaaaatcagcgccggtgggtagatttggaaaaacctttgaagaagcagctggataaatatgcattggaacctaccgtctattttggagtggtgttttatgtgccttcagtttctcagctgcagcaggagattaccaggtatcagtattatctgcaactgaagaaagatatcttggaaggaagtattccttgtaccttagaacaagcaattcagctagcaggcttagctgttcaagcggattttggtgactttgatcagtatgaatcccaggactttcttcagaaatttgccttgtttcctgtgggatggttacaagatgaaaaagtattggaagaagcaacccaaaaagtggccttactacatcagaaatacagagggctcacagctcctgatgctgaaatgctgtacatgcaggaggtagagagaatggatggctatggagaagagagctaccctgctaaggatagccaaggaagtgacatatccattggagcgtgtcttgaaggtatctttgtgaaacacaagaatggaaggcatcctgtggtatttaggtggcatgacattgccaacatgtcccacaacaagtccttttttgcattagagctggcaaataaagaggagaccattcaatttcaaactgaagacatggaaacagcaaaatacatttggagactctgtgttgcgcgacacaagttttacagactaaaccagtgtaacctgcaaactcagactgtcacagtgaacccaatcaggaggaggtcttcttcaaggatgtctctgcctaaaccccagccctacgtgatgcctcccccaccgcagttgcactataatggacattatacagaaccatatgcttcttcccaagataacctctttgtgcccaaccagaacggatactactgtcactctcagacaagcttggatagagcccagattgacttcaacggtcggatccgtaatggcagtgtctacagtgcacacagcaccaactccttaaataatcctcagccctacttgcagccctcgccgatgtcgtccaaccctagcatcaccgggagtgacgtcatgaggcctgactacctcccgtcccatcggcacagcgccgtgatacccccgtcctaccgccccaccccagactatgagactgtgatgaagcagctcaacaggggcctggtgcatgcggaacggcagagccactcgctgcgaaacctcaacatcggcagctcgtacgcctacagcaggcccgcggcgctggtctacagccagcccgagatccgcgagcacgcacagctcccctcgccagcggccgcacactgcccgttcagcctgagctacagcttccacagcccgtctccctacccctaccctgccgagcggcggcccgtggtgggcgcggtcagcgtgccggagctgaccaatgcgcagctgcaggcgcaggactacccgtctcccaacatcatgcggacgcaggtgtaccggccacccccaccctacccgccccccaggcccgccaacagcacgccagacctgtcccgccacctttacatcagcagcagcaaccccgacctcatcacgcggcgcgtgcaccactcggtgcaaacgttccaggaggacagcctgcccgtggcgcactcgctgcaggaggtcagcgagcccctcaccgccgcgcgccacgcgcagctgcacaaacggaacagcatcgaggtggccgggctcagccacggcctggagggcctgcggctcaaggagcgcaccctatccgcgtcggcggcagaggtggcgccgcgagccgtctcggtgggctcccagcccagcgttttcaccgagaggacacagcgagaagggccggaggaggcggagggcttgaggtacggccataagaagtccctgtcggacgccaccatgctaatccacagcagcgaggaggaggaggacgaggacttcgaggaggagagcggggcccgggcgccccctgcacgtgcgcgcgagcctcggcccggcctggcccaggacccacctggctgccctcgcgtcctgctcgccgggcccctgcacatcctggagcccaaggcccacgtcccagacgcggagaagaggatgatggacagcagccccgtccgcacgaccgcagaggcccagcggccctggagagacgggctgctgatgccctccatgtcggagtccgacctcaccacgtcaggccgctaccgagcccggagggactctctgaagaaaaggccggtgtcggaccttctctctgggaagaagaacatcgtggaagggctcccgcctctagggggaatgaaaaagactcgagtagatgcaaaaaaaattggtcctcttaaactggctgccctaaatggactctccctatctcgagtgcctctgcctgatgaaggaaaggaagtggctaccagagcaacgaatgatgaaaggtgtaaaattctggaacaacgattagaacaaggaatggtattcacagaatatgaaagaattcttaagaaacggctagttgatggggagtgctcaacagcacgactccctgaaaatgcagaaagaaatcgattccaagatgttcttccttatgatgatgcgagagtggagttggtcccaactaaagaaaacaacactggttacatcaacgcatcacatattaaggtctctgtcagtggaatcgaatgggattatattgccacacagggaccattacagaatacctgtcaagatttttggcagatggtatgggaacagggaattgcaattatagcaatggtgacagcagaagaggagggtggaagggagaagagctttaggtactggccacgacttggttccaggcacaacactgtcacctatggaaggtttaagatcacgacccggttccgcacagactctggctgctatgccaccacaggcctgaagatgaagcacctccttaccgggcaagagaggaccgtctggcacctccaatacacagactggcctgaacatggctgtccagaagacctcaagggatttttatcatatcttgaagagatccagtctgttcgacgccatacaaatagcacaagtgatccccaaagccccaaccctccgttgttggtccactgcagtgctggggtaggaaggactggcgtggtgattttgtcggagatcatgatcgcctgcctggaacacaatgaggtgctggacatcccgagagtgctggacatgctgaggcaacagagaatgatgctggtgcagactctctgccagtacacatttgtgtacagagtcctcatccagttcctgaaaagctccaggctcatctaagctcccacaatttcttacggggccagtcatgtgaagcgtttacagcttaaaaaaaaagcgcttgcctaactcatactttcccgttgacacttgatccacgcagcgtggcactgggacgtaagtggcgcagtctgaatggcggcacgctgaaggaaacgtgcgaagcacaggctgaagaggggtttctaacctgggaaaggtgctcaaggaggacttggtttca

SEQ ID NO: 343 - DNA, 1530 bp, Homo sapiens
aattaaatggacaacaccgttagatgtgtatgtaaaaattttctgtttcatatttttcctttcactttcggtttagaacatgctatatgtactgtatgtcctgtggcccagtgcggctccacagcatggaatctgatgtatgatatgatagaatgtggcactaaatgcagtttcagattttatttttttaatcatatgaactaaaattgtcaattgtgagttgtgctttctcatcatgttggttatattgcacaattggttatatttatgacctgatattcaaagactctggcattgatagccagtgtgttttcttatttaactccgtttactacattctacatggtgtttacgtgatccacacttgaaatactagatcagtagacattcactaatataccaaaataaaatgaaaaattgagtttttccgtgaactttatactgtccagctctgttgattttaaagcttcttcatccaggtcagttcaggaagtatatctggagtacctggctctgtttttggctgtgagactagcactaaggattctggtacctttacccaaacctactgggctactaatacttctctcagcagttgaatcaaatacaatagaccatgtaagctggggccgctcatccacttccagtttgctggtctccctgctagaagacacattgtactgtgctttttctggaattcacgataatggcatcactgcctgtttttcacatcttttgtttcctgttcattttaaggaaacctactaaatccagttaatattaaatggacaccactcattaagaaatttctttatggcttctgcctgaatacttaaaatgccttactacagttatccagttgacatgtttttaattcatataaggtatattgggtatattgaagtatatattgtattacaaagacttgttcttgtattttaaaatgtcagtgcaaaaaatatatggtggaacctttctttaaagttgaaatgcagtattatttaaatctgaaaggttaaaaagctttcttcaccttatatatgttcttccactgtgactttttagttgaagactagtaaattaacttttagttagaagatgcctactgcttttgttgtttattttaatcagcagagcacagagacacataaaaactctgggaaatgactaggataaaaatatcagtatgtatctgttttagatattttgagttttgctttttttatgccttgaatattttatttcaaaaagtatctgaagcaaattctcagactgaactacttcttagacctcactgtaagaatattttattcaatgtctcatttatgatagatttgcaagctgctcatttttgaacagctttttgcatgggataggagcatgtctattctaacacatcagcttattcaaaagcaagaattttaaaaataagataaatgtaaagttgttttataaacgatcctgttaattaaaccacagacaccatatatccttctgcatcctttggccaataaaagttgctggagaacc

SEQ ID NO: 344 - DNA, 391 bp, Homo sapiens
ttcaaaagtggaagcttgtttaatattgctctaccatcatcctgaaaggcataataatttgagttacacatctgaactgattggagttacagaatcatatctcctttttgcatttaacaatatatacaatataaaataaatacatttacacaaatggacatttgctggagcacacagtatggtacacatcacaaaaatatacaattgattgctttacagatgtgaagcccatctacagctatagacatggttttattattattattattatttttactactggctataatgcaactcctggattattataagcagtttaaattttttgtccttttacgatctttgcacataagactgccataaaatgtttttcctaaggcaggtaaacagg

SEQ ID NO: 345 - DNA, 414 bp, Homo sapiens
  misc_feature: n=a,t,g or c
ttttttttttttttgcagatcactttgtatttattacattactgaactttttcaaatgacagaattcaactccaaaataaagtaataaatgcctattaaataattattcacttgtatttttctcncctaaaattttnaccccagcaaaacatcttaaagacatgtgaataggttcagtgcactctcagtggctcacaatcatgaggcaaatactacatttatccataaaaatataagataaacagatcaatattttaaaatattgctgacataaaaggaaaaaataaaatactacacttttaccacaattattttggtagatgatagtagaacattgtttaaaataatgctcctctacaggacacatgctgtgcttggtatacttgggcacattagcagttgggtaactggtcc

SEQ ID NO: 346 - DNA, 212 bp, Homo sapiens
taggttaagaaaactgcaggagttgtcatgaaattctattggaaagaatataaaaattatcttggttttaaattgataccaaagtctgtctagaaacaacccaaccactgcaaatttggtttttgcaagttaatttaattcaaaaaaatacttgtactcccgtgttttaaatggtcttaattattcatcaccataaaaagtagtttaggaga

SEQ ID NO: 347 - DNA, 470 bp, Homo sapiens
caaatagaaaataataatttattttaacttcattttactgtttgtaactaatcatgattttgtgaacttgcctgtataagtctgtaccttcaaatctacaaagcaaaagtttactacaatgagcacttaaaattccacaaaccgtctccatccacaactttcctgtacatgcaaattctttcagtgggctgcaatatttgcaaacatgctttaaacttccataaagatgcaagatattttgctttctgctaaaacctttacactctcttgggaaccttaaccaggaaaatgtttaaatgtatatcccaactctaaacgctgccggtttggttatatgtattaaatcgttaaccaccgggttgggtggttttgagttgaaaccttcacctaaatggataatatcttaacgggtcacgcatatgaaacacattcagtaacgtaccattataaaatagggggtccattaaaaa

SEQ ID NO: 348 - DNA, 516 bp, Homo sapiens
tttttttttttttttcagcaaatgtttgttgaattttattactttttaaacaaattactgagtaatcttccttagtaatcatttctgtaactcagataaaaatagaaatttataagagtttttatttttgttacttgtaaaagtatatttcctagagaaaatatcagcagtggtagagaccagaaaaagtaagtgtgtgtgttctaaacagtgattccaactcaatgtgttcagagaaaacactttgaccctgtctgtgtttacagtccctgctgactgtgtactgtcgtatcctcagccttgttctatttctttattttagctttacagagattaggtctcaagttatgagaatctccatggctttcaggggctaaacttttctgccattcttttgctcttaccgggctcagaaggacatgtcaggtgggaaacgtgtttctctttcagagctgaagaaagggtctgagctgcggaatcagtagagaaagccttggtctcagtgactccttggct

SEQ ID NO: 349 - DNA, 99 bp, Homo sapiens
  misc_feature: n=a,t,g or c
ntttttattctaaaataaagaacatttattatcacaagttggataaaaacacacagcttttacaaaaatgatttttgatagaaaaatatgtttgaatac

SEQ ID NO: 350 - DNA, 446 bp, Homo sapiens
tttttacacaaagaaaaagattttattgtcttcttagtcaatatccctggtgaaattagaggcatagcttgagactggtgacagtgcaacacagaccttcaggagctgctttgaggactggcctgcccagatgcctgctgttaagccagcagccccctcactccggcccctgccatcttgacagatggagctgccatggtttcagggacactcagcagggcatctgggttggtccctcccacatggaccttgtaaagttgctattcaggggaacctggtatcgtttcaggcaaaacacagaaccatattagcacttctaagccccctgccccggccgcctccccggaacatttgggcttgtcgcacattccaggagggagcaggagcacagctgcagccacagctgccaggaacaggcctgggctcccgcctgtgtggggggaagg

SEQ ID NO: 351 - DNA, 397 bp, Homo sapiens
ttttttttttttttaagatgtaagaaaatatatttattttttccatgacaatactatgataaaattgttaaatacatgcatgttttaaaaacagacataagtaacatctttagagttaacagccaagcatactagttttacatttatggtgttttagtaatagattattttctatgtttttgctataatcatgttttccaaaagatacagaaactaaattctgaaattatacaatgatataaagtgtccaaatttcccattctaacagcaatttaaaatccaaattttcacaaggcaggaaatgcttcagttatcatctaagtggagttgttttattccatattactctccagaattctgtgaatcagactggaatcacaccccatgggacttcatc

SEQ ID NO: 352 - DNA, 427 bp, Homo sapiens
  misc_feature: n=a,t,g or c
ttttttttttgcataaaatactgtttattttgtcctttaggaagactaaagtagtccagctcccctacagcccagtcttgcccccaccctgcactctgtcgccttagttcctggggaccaagcatctggcatttctcaagcagaccctctccttgttgctccttttcagtccctggagtctggcttcccaaagccaaagctggaggagagctcattgctgaggaagcagggttggagcctgaggagatgcagagggcctggacccctcgctggatcccagaggcccaggggcaagagatgctgggacagggctctaggggaccactgggtgactcttgaggggctagaagcagggctggggtnacttttgctacggtgggctgcaanactgtctngcttcttaaagcgcttgccgcagaatttcaaa

SEQ ID NO: 353 - DNA, 397 bp, Homo sapiens
gctgattgaaaatgatttattaaagtccaattagtatgcttttcatttcaaataatccatatagcctccagaaaaatatgcacatgtgtaaaagtccacgttcatttctttcacttccaatataaagtattctgtattttgtataaagtacgtgcaaacacctttctgctaatcgggtccccacattcttttcactacaggtactttacaagtctgccctctgctcaaacactaaccgtgcactgacatcctccttcctagacagccattcatctcccggacttctttctctcagacatcctcctgacctcccctgacctgcttcaccactgtgttacctcactggttacttgttacagcaaactgatgcaactactagtctacctgggacaacata

SEQ ID NO: 354 - DNA, 154 bp, Homo sapiens
tgtacatctttattatttctaaagcactttcctcaacctaatttcagtttttacaattggtactcaagaaaatagagacagaaatcatttgattttgcccagaaaccatctgcttatatttataaggccacctaatttgaaatcacatatagac

SEQ ID NO: 355 - DNA, 391 bp, Homo sapiens
acaagtatctacaaaatctttataaattcacatatttttctgaaagtgtacaagcagtctcaatttactgggacaaaaatgaacatttttgttctttagtaatgaagtcaatgtacaattcagagcaggtgtccatagaaacaactaggtttgaaaaaacttaagacaattcacagttgaaatcaaacaaacactgtgaatgtgttaaatacttgccatataacaacgctttaacattgatcttgctaaataaggctatgattcataagatgcatgtatttccaaagctgtttaacattcttataaattaattcacaggattcaaatagttgctttttagcttcaactgggtattagcaaaaataatacaaaatgatccccgtgcaagcac

SEQ ID NO: 356 - DNA, 383 bp, Homo sapiens
tactctctagaaaatatttattgacacattttaattttctttccatattctgagaaataaacaaaatacacaaaatacagtaaaatgcacttttcccatttcaaataaatatactatactcttgtaaaaaaatttaataatctgtgtaatttgccacagtatattaatcagtgaaataaaacaaagaatctctaaattgtcacatgttttaatgattctcacaagcatttttctggagaaaaagaacactattttctgtagaatttatattgacttggagactattgcttcttgtttggagaaggcaaagataagctttttaaaaagtgtttagtgtcaaaaagagtcttcatttgggagaaaaacagcatacaagtcctttc

SEQ ID NO: 357 - DNA, 381 bp, Homo sapiens
ctctttttttttttttattccatttttacacatccacctgtttgccatgaagtcacaacattttatcaaaatatacacacagcacaaatacctttaaaatgtatggttggaattctaattcaactcaattgactgctgcaaacagcatgcatgggccattgatcttgaatgatgcctacggaggggcttatgagtcatgaaatcaccagtcatggcacgagaaggggttaaggttcttttcccaggagacttatgcacttcatttcttttcttgttatagtgtgagaatggcagtgagtgactgtgccaatactggagtctgctgagaatgggtggatggaaaggtttttactggcaagggtgaaatgatactatcttttc

SEQ ID NO: 358 - DNA, 339 bp, Homo sapiens
ccacgcaatcacaccatttattgctgtgctgtccggggaagacaccgtgcaaatgccaaagtgcactgaggagaggggagggtctgtgactcccaaaccctcgaatattttatgaatctaagagtccagacgcagttcatccacggagatctgcgccccgtccacaccaacacccacgtttgtgcacccacatgtgcacggtgctcttcagagcggcgaggtcctcccccgcggagaaattggtgggagaggcagaggtcactgagtttcctcctgtttcgtgtcacctcttggcaacctgtgcctggcttctagaagcggcatgggcaagaaaaggaa

SEQ ID NO: 359 - DNA, 464 bp, Homo sapiens
ttttttttttttctcacttccctttttatttcctctaagacttgcaagcagcagcaccagagagggaacctgccctcctggccctggaagggcggacccccaacccctaacccaggacacagctggcacctcaggcccctttccttctgaaaggagggctgtgtctctctcacattcacacatacacagacacatgcatgtgtgcacactcatggcacatgggacctcaggggtagcctgtttgccgatccccccaagaggtaccaggaggcagaccgctagaaggagataagaggcaccctggtctcctccaacccaaggaggaagaaagctcaacccctctaggatagggactgtcttcagtcaatggagcgttgacttagggggcgtttttgaaggttttttttcctcctttttgcagtctttacaaaaatagaacttctcttggtatttataaatctacg

SEQ ID NO: 360 - DNA, 281 bp, Homo sapiens
taccaaaatatctgtattatctataaaaattgaactctaatgagtcactgatacgggaggcagcaatacccgactgtgctgacatgcagaaggaagacagctctgtcccaccaaccctatagcagaacatttgtattgagtggcacgtgggctgagtcatttgtaaggtctcaaaaacctggacactttggaacgtagcaatcggatgaacgatcttggaaacatctctcgggactcctgggctgtgtacttgaaatagttctggggatgggccaggacat

SEQ ID NO: 361 - DNA, 353 bp, Homo sapiens
ttttttttttttttttttttttttttttttttttttttttttttggggcttatgttgatttaattttcacaaagatcagattggatgccctctgatgtggggctgtggagacaacctgacagatctgggatggaggcaggtatagcagcattgggttttggtatcaccatcacctgtaataccaactaatctccaaataaaacccaaactctgtaccttaatctggattgttgtgctctgcaaacgaacggggacgagggccgtttgccatggaaatttatctccatcacctaatccctaaatagggccaggttccacacagatacctcttggtgggaggtattacccaggct

SEQ ID NO: 362 - DNA, 422 bp, Homo sapiens
aatcaatttaattaaaatgataaagtacttacagcaaaataatggctatacaaatacagtatctacttacagcaggtggatacactatagataagatatatcccatctagattatgtgtcataagcaaacttctgtttaagtaaaataaatgtcccaatccaatttcaaatatagtttccctctctctcattaaaaaaaattactagagtccaattattatttaataaaccctacggcactgagaaaactagcaaaggggtgcaaagaagtagtagaaataatttaagcaagactaaaacacacagaatctatatggacctcaaatggaactgaagtatgcatttcagtgttcaaaaatatatgcatgtgttgagtgtgaccagatattaatataataaagccttggaaatgtcagtaaact

SEQ ID NO: 363 - DNA, 401 bp, Homo sapiens
ttttttttttgttggttcatcacaaccttttatttcacaatattaatagtaatcattatagctaccatgtattaagccttcaccatggggctgttaagtcttcattgcttagctttactaaactagataatgtgtttgcttatctcatggatttctcttaaccatcccctgagatccccctatagttcttatccctttacccccattttacagaagaggaaaactgaggctcagagaaggggagtcacttggccacagtcgcacagttggaaagtggtagagccaggatgagacgctaattctgactccaaagctagttatatataataatagcacccaagtaatgtatagattaccatgttttcacatatggcaaattaaggaatcagaatgaatgatgc

SEQ ID NO: 364 - DNA, 336 bp, Homo sapiens
tttccttcatgagatacttttatttttatctctttctctactcatgtgcttaactggtgaaatgattctgtagaaatagatccttctgattctgcatctcatttccttatggcaactacaacaggaggaatccagctggaaatgccactaaccccacaatccagcacctgagagaggaagccagtcggagcgccgtgctgggctcactcactctggcctgcgcactggggttgtcacatccattttccactggctatggggaataatatttggttaaggctgttgaagcccttgcttttgaggttttacattatttggtaatgaaagccgtttttt

SEQ ID NO: 365 - DNA, 290 bp, Homo sapiens
tttgtttctaaaaagtttattgtaaaattcaaagcttcaacagcagcatcctttagaaaacgaagcattgcccggatccgttttgaaaaagcagcgcagtcggctaagtccttcacgctcctgcaactgtaccaagtccagggcgccgctccttcctgccgagcgcaggctgctgagtcacgcctgcccggccagtctgtccttcctggccctgaggccaacgtcctagcctaggccttcctgggcgagcagccgctccagacacttgcagagtcctcagctcggaccag

SEQ ID NO: 366 - DNA, 329 bp, Homo sapiens
ttgttttttttaccagatctacttttatttcagaaggaagtttgtattatagtatttacttttgtttatatacaagttcttcacatttgtgtttaaaatgcacagacctcccttagttctcttgttcctgcttaaattagctgttattttacaatacagaaaataccaaaaaattgcagtcctaaatgtatgtataacacccacaatccccgcaatgaaatagtttacaatacttactccatatttacatgagtgtaatagatgctaaattatacatattaacaaactaagcttgaatccaaacgaacgaaatcgtaaataactataaa

SEQ ID NO: 367 - DNA, 428 bp, Homo sapiens
ttttaggaagaggctgaatttaagacaaagaaaacttgaatgttaaatatttaaaggattataaaagagcagcaacattcttggtctatttttgtaggcaatagatatgaggattaggttctgactggaatcctgagtgtcacggagacagcccccacatgtgacccacctgtagttttccaacaggcatttttccaagagtgagttttggaacattaaattaagagcaaattaaattttctcaggctttgaggggcctgggctgaatttttttaatgtatagagtttagaatcaacgatttaaagctcagtgtcccctatatgggtctaattatgaacatgccactatgtccacattagaattgaactgattttgtaacaagttattttctatgaaaccctggaaggtggtgaatgagggaaagtgc

SEQ ID NO: 368 - DNA, 384 bp, Homo sapiens
tttggttttcaatgttttatttcacaaattgttcagatttgttcataaaagatatgttacaggaacattttagaaatcaaaccagttctactgaaacaattgcaacaacgtggcccctgttcatgcaaagcacaaaaaacatttacaataaaactttgtacacaggaagtagcaaaatacatcatttttcatagaaaaaagcacacacataaactgcgggctgagtgagcctacagacaatatgagaaaccagcacacgctttggaatacggtagggcaaaactcctaaggaagccgaaaatgttcatcctgtgggcaggagagccaggaacgccgttggcttggtacaagatctttttaaacacagggtaagtgttggtagca

SEQ ID NO: 369 - DNA, 415 bp, Homo sapiens
ttttgttttttacaaaagtgctcaaatacaatgcttgcaaatgtttggtctcttggatttcactctgctagcaatgggaaaatgtggaaaacaaaaatccttccatgcagaacatccatgaagctaaaattaaaccaaagtagtatactcataccaaaactctttaagagttccttgggtattttgaggattatttaaaatcatgtaatatgtggcaaacttatgccatcatccatggcttcctatagaaattctgttggaagaattgggggtaagatacatatatatatatagtttatttccccttttagaaaaatcctaatggaatatcaaatatattccaaagttgccaatgatatttgttactaaaataagtttggtgcagttactgcatgttccagagcggatttggaag

SEQ ID NO: 370 - DNA, 328 bp, Homo sapiens
tttttttcacaccgctaagggctttatttcacagatcatggtggtgagtttggatttccagccctcaccacggttaagtcacacatttcccgacacctgctcatttctccagatctgaaacatctcacccaacacatcctagttgttgtaaaccccaaatgaactttccagaagcaaaaacaataacagattcagagaaccctggtcacacctgctgagcagtcccctctactctggttgcatatagaatgcttgtttgctcaaaagagaggcgctctcaacatcaaggcacaaagaaagacgtctccaggggcaaaatgatgacgaa

SEQ ID NO: 371 - DNA, 352 bp, Homo sapiens
ttttttttttttgactgtataattttaatatttgaaaaattgcatccagaaattaatacaatacagatttgtacaaaaaaggaaggacgtaaaaacttctaatcatacagacaaaaatatgactgactaagcaaagattttaaaaaaggacaggatgtttaaaaaatactgataaatactgtgtaatgctttaatttactgtggcagatacaaaaatcaataattcattaacagattatatatgtaaaaaaagtaactacatgaattttctagctttttaaattaataaaatgtaacagtagtggtttttattttttaaatgaggtattattacactgtaaaccaaaaacag

SEQ ID NO: 372 - DNA, 503 bp, Homo sapiens
tttttgtaatcctttaaaaatattttattaagcattgatttagaaaacgcaagacaagattgtaacacctcagggcaaaggcttgaaggtgaaacaaataacactataaatattgcacttctaaaatctttttttgacatcttcacacaactcaattctaaaatatccttttacagagatgtataaataaacgcttccaagctgtcaacgcttgacacttttagcttcctatcaccgcactaagtcggcaggtttccaatcagatagctgctcctctgacagcaggcaaagaacttccctcagctatctcggaggcctcatacctccatcatgtgaagagtcaaccagtcccatctttcggaatgctctttcagaatatgtaattttataagtatttttttttctactgagagaacatagatctttcaaaggcaatggcagaatacagcttaaatggacacagttcactgttaacattgcttattttttaaggcatccaggag

SEQ ID NO: 373 - DNA, 412 bp, Homo sapiens
ttttttttagtgctaaaatataacatttaatgtcacattgttgggcgactcccatttactttttccatatatacagtgaagacttacaatagctcacaatgcagttaagaattgcattttaataatctcaaactaccatctaatggaggaaagaataagtttgtcagaaaaccagtacagccattttgctattaaaattttcctttttaataatttatttaaataaggtatttgaagcagtttagaaaaaacaagatttgtattttatttccttgtaaaaatctttacacatgcagacaaaccagtgttaagaaagtattcaccatcatttaaacaaataaccacttaaatagaacagtgtctgcaattttatctgtataaaaataagatacatttttacagaattcacgct

SEQ ID NO: 374 - DNA, 483 bp, Homo sapiens
tttttacagatgaatcttttatttcatgggtgctgggtatgtggtctttttaagacaaaaattctacagcatggttttactaagtcagattgagtaggtcgcatctctgtgtgccacacagaacttttagacaagagtagaggggaaaaggttctgcaattcctcacagtaaagtactcacacagtaaatccttaacgaaaactactgaactgtgagtatatgctttataatcttatgcacagaaatgtatctattagtacagaaagttggaaaacaccaagattaaaaacagtgctgtaggaaaaattcacaacagtaaacaaattttgctcactcattttcctacaaatcttcagtttattaattcaagagaaactatattaggaatattcggctgatacccctatttcaccacctcatctaagctacactgtattataccaagaatggtggcaattttttccccatctatacaggcactg

SEQ ID NO: 375 - DNA, 406 bp, Homo sapiens
ttttggtttacaggttatatttattattttctatagtatctaaaaagtaacatatattgttaagactttgttaaaaataactctttacacagctttcggaaggtaactggcaaacaaggtttacaagtaaaagataaacttttcaaactaaaatcagtttgttgtctttacgcaatttacagaagcaagttatgattcaatttaagtatctgaagcagtttccacaataaagcattcccaagaaatagaaaacggagcttagataaagcaccagctgtcacattgtcaccaagttaacactggttcctcactggtctccataacatgatggagagcaggagaagaaagggaaggaacacttagagaggaaaaaaaaaaaaccctgaaatctgaaattacatttact

SEQ ID NO: 376 - DNA, 299 bp, Homo sapiens
tttggggaacattctaaagcctttatttagcatcaggtagattatttcattataacacttgttaacttcaagacagcaattaaaatcacggactggcagctacctaggcccctgggagcagtatctcagtctggggtttgggtggataaatactataagatttaagatgaatgtgccccaattaaaggggcaaaactactgtacagtaggtctccacacatattttaagtacacaggtactttgcaaacttgaaatgcacaaggcctccttttatatagtttgatacttacatgagtgc

SEQ ID NO: 377 - DNA, 185 bp, Homo sapiens
ttattttcataaatgacttttacttatcatttctcttgacagtaattcttggcaatgtgcatataacatgaagggaagcataactttcagaagtcatcaaagatattatcctgttgtcctcattttcttaaaccattaaaatattttcatttataaaaattaatctaaatataaatattgacact

SEQ ID NO: 378 - DNA, 346 bp, Homo sapiens
cagtcattgtatttatttaccagcatttatggcaaatggccagacctgggcagggtggtagcaatgatagattttacaaattaaggcattgttctttatttcaaaattttcatttacctatattttccttggtcttagaaatatgaataatttagagctggcaatactcaccatcaggatataataaacggaggtttctttgtctgaaatccataaaatgtagtaatactctattgtacttttaaaaatcctatttttgcagttggcttcctctcagtgaattagttaggtagttttggtacatttggagggtcataaacatgtcatagaaagagtactggcatta

SEQ ID NO: 379 - DNA, 194 bp, Homo sapiens
ttttttttttttgctgctaggtaggcagttttattatgctgttacatagagctctttccatgaaaagtgattttaacatgaactgcccattctgcaaagaggaaaaatatgttgaattagttaaatatccaattcaaaagatgttacagtaaaatacatgtaagacttaacaaaaaaaaaaaaaaaaggacaga

SEQ ID NO: 380 - DNA, 277 bp, Homo sapiens
tttttttttttttttttagttacatagcatctaagttttctgatcactaccaggtaattttcaaccaataagaaaaaggaaccaacactcagctctgtagaaatctaccttcttttagaaacctcaggcctctgcacccctttagacaactcatttacaaccacaaccttccatggcttctcacatgccagccagggcagggtaaaaacggcaatttcttacaccgaaagggcctttttatgtaacaaacagacctccccaaaccacaacttttttg

SEQ ID NO: 381 - DNA, 288 bp, Homo sapiens
caacaggaaatatcctttcctatatattgtgctattctgtattcactaccttttcagttttttttttttttttttttttttaagttaaatgcttttcagtaatggattctcccaggcactaaactacttaagccaggagtataactacttcaaatacactatgagaacctaaacttgggtctctggagatctgctgccagagtctacttgttctaacctgtgtatgcgcaagatacaccacattataatagttttgcatttgctatcatacattagttatgtagaatc

SEQ ID NO: 382 - DNA, 459 bp, Homo sapiens
aaaagtatttattatagtaaaggttactgttgtaaaacattagtgactttggtccatatcttatttgccatttgtctttaaaacattttacattatttgcatcataaattgtaatttttatgactatacataattggtttttttcctgacccttggaatgttagtttcatgtaactttttaaaaaattaaaacattgcagactaaatgtactgataagtacatactgaacacatttaattaccacagtaattaaaaagtcctgatctttacttcttaagatgaaaattcattaacttgcaatctctgggatttctctattatccacaatgagagtatgaataatcccttctttccgcttcccactactgacagcctttatgtaacagtcatggttcccgatactgaagtgagtttcagtcccatcatctacaaactcacccgctgtctccaatttttta

SEQ ID NO: 383 - DNA, 418 bp, Homo sapiens
aaacaaagagggatttattttatttacaagaattctggagaaggatggcggctggtattggcttggtgaaataatgatagggtcaatgactctgtgattctcttggcctttttgtcatggtagcaaagtggctgctgtggctccaggcatcacaccctcaatcaaggtaggaagaagaggcccagggaggtgttagccatgcctgtgtcttttattggaaaagctttcccagaagcccaggtagacttcctcttcaatttcattggccacacctgatcacatagccatcctaagctgcaaaggagactggaacagtgaaaatctggatttacagcctccacagttggagtggctggagatacagagttgggacgacccctgaaaagtgaaccaaggtcgtctgcacggctgccctgga

SEQ ID NO: 384 - DNA, 428 bp, Homo sapiens
tgactttatgtactggtaatttattgcacaggtttttctgcatcaaaaaagtatctgctaaaatagagaaacagttgtgtctgaattcacatttccccccaacttctaaaaatatttcccctaaaaaagaatccactcatctaattttaaagaaaatatacttcttacacaagacaatccaaactgatgcaaaatatttattccaagttagttattttatgcagtagtttccccctcgagacttgtgataaccacatcttttaaatctgtaaataatgttatcaaaataatcttaatctttgaaatctcacaaaaatttatattttacaatccaccctgaatatcaaggctgcaagaataacacaacatttcctatatccaaatattttacagctgtacccaaaaaggaaaaagaaaaaaaaaacaaa

SEQ ID NO: 385 - DNA, 365 bp, Homo sapiens
tttttttttttttcacgttttacatgtacagagtttatttgttgtttttacttaaaaagatacccaactgaaatattactaatgattaaaaacaaattcagagttaattacaaattcagttgaaacaaaatttcagtttggattaaatttacactgtgaattacaatgaagtgtcactcaattgcaaaatgatttccattcatacagcattttgtttttcataaattttgacctctgaccaaagaaaacacagctttttgggtaacattcatgaaaacattgaagcctataatataaatttttattaccactttcaatagtcattaatataaaaagttaacaaatttaaacaacaaagtttaagc

SEQ ID NO: 386 - DNA, 288 bp, Homo sapiens
tttcatgctttttatttttcggtttatttaatcttctttaacacagccattgttggttcaacaatccaatatttgaggttacattattgcaaaaataaggacatagctgaataggttatgccatcaatatgtttgttaatcctatcccttttattaaagacaaagcacagtttgttaatattgtcttggattaactctatttgtaaggttacttatagtggttcatactaaaggcaggggatttgcttcctgggccaattgtctttaaactataatttaagaaatcat

SEQ ID NO: 387 - DNA, 466 bp, Homo sapiens
aggatgatttttgaagaaccagtttattaagagattacaccaaaagcataaacaatttatacgtcaaactccgactgaaaaaaaaataaccgataaggatgttttttaaatgtactgtactcacaaataacaagacaaatttgacctgttcaataaatagaaatgaagtggctaaaaatgtttaaatggaaatggaaaacagtcgtcttctttgtacagttttgaaggggtgccccctattcacgcctacacgtagaaaaaccctgacaaaatcagaggttcacttaacactccaaccatatgagcgtattaaggtttcttttcagatcttaggagatcttgtccaccttaatcccattcacagatcttaggagatcttgtccaccttaatcccatcataaagactgttggcatgagttctgatgtactgttttaatatgctgagtactgttgattcaacaacaaa

SEQ ID NO: 388 - DNA, 419 bp, Homo sapiens
tttttttttttttttttatgctcaaactaaggcattttattagctggctttacaacttaaataatatcttggctttcaaaggaacagcttccactaattccaaattaaactttcacaagtttacttgtttggggagggacattcttatggtcaccacaaaatacttttattataaccttccccaaatcttttcttagcattaactggaaaaaaaaaaaaaaaaaagcttaggtcaaatatcaactgcctgaaaaacccaattaagttacttttccttaaaacatgtgcagtataattgaatcaaaagagaaaactgcaaatacattgtgctttggccagaagtagagttcatttcatgatgattcagtatcttcagatactatttttgacacttgccataaatcttagcaaagtaaatc

SEQ ID NO: 389 - DNA, 487 bp, Homo sapiens
tttttttttttttttgttaagacaggaaacacatttattgagagcacagtggggtgcgccaagccctgtgctttggaaccgcatcacagcgcccctcacaacagccctgtgaggtaggtgaaggagcccacttcccacatgcagacactgaaggctcaacagctcccctaggcctcagggttcctgcggggtgggcaggggtccagcccacgggtctgaccccaggtcagcggcgtccatcagtcagagggcgggtctctactcaaggggaggccccgggtccagagtctctgggtccagcctgtcccgtgggaataggtgcagggtgtccccgtggctgtggagggatttcgagctggagaggggctggggtccacattcgaggtcccttcccacgtaggcatccaggtgatggcttccgccaaaccaggaaggagacgagaggcccgccaggaagaagacttgggtccgggatggtgggcccatc

SEQ ID NO: 390 - DNA, 380 bp, Homo sapiens
cgttatcaatttttatttcctaccatacaccaaatgtacagcactgaacacaattttgttgctttgatgtaagaaatattaagtgtttggagaaacagtatacaaacaaactacctcaaattaaaaaaaatgcatacatcattgcctttctgtttacaaaagacccaatttacagtattgatcattaacatagttgaaaagaaaacaaattcagtgcacattacaaaacacatcaagtacaaagtaggcaaataaatacaaacatacttcacaaaacatcctgctcaaactatgcaaacacaaataaattaacctgaagtcatagcaaattatagtaataaatatgtmggttggtaagagatttcttttaaattaaataa

SEQ ID NO: 391 - DNA, 380 bp, Homo sapiens
gtatttatttytyctagaaaaagaaatttttscaatagaattttattaacacctttctcaaacaaggtttccatgacagaaatcttgacagcaggvgcactagattttyttttttttttaacatgttctttaaaacactgtgaagattaaaaaacaatcttggcaggctgatggctgcgtcavvacttccgggcctcctgctctagggggcatcaccagtattttgccaccactgagccagtcctcttggtagtagcagtagaaatttaattatttgaaatgaaaccagaaacatccctsgcaactaacctagttttcttatcaatgcattaatgaacattcttttaataaaaatatttaatacaagvcacatttbgctg

SEQ ID NO: 392 - DNA, 316 bp, Homo sapiens
agttccatttatttattttttgccaggcgaaattttaaaggaataaaaggcaaaaaagaaaaaaagaaaatgaagaaagagaagaaaggaaggaaactttgctctcttactggtagacaaacttgcaagaccagcacaaaagaaaaagaaaatttctttttttttttttctactacattaacaggactcaaattctggaggaacagaaagcagactatatgtgcaatgctagtatctgtacattacatagaaattgctcaacttctttttctgccattagttttatcatcagttaatacagcaaatcataaaatat

SEQ ID NO: 393 - DNA, 250 bp, Homo sapiens
  misc_feature: n=a,t,g or c
gcattttaataaacttaatttaatgaagcgctgcattccacaagtacagtcagtacagtagctctcctttgggatggaaaaattacaagaagcaatgccgaggaccgtgaactgtatacagaagccttgtggatctagaaaccaacagtgtgtgaacttaggacattctcaagttttaaaacgtggccattataatatcatcacattacataaatntcacatcaccaatattcgttttgtttttttcttt

SEQ ID NO: 394 - DNA, 322 bp, Homo sapiens
  misc_feature: n=a,t,g or c
cagtataatggcatttattatttattgagcacttattacataacagatggggctctagatgtttcacatgtactttgtactagtttgtttaatcctacatctactctatgagatacatattaacttccattttacagatgaggaaattgaggcacagaggttaaggaacttgcctagggtcacagggtagtgctagccagggatttgagcccaatctgggcatgtnctcataattactagactatatactgcctgccctggtgtgagaagagaagtaaggcataaagtagaaggaacaaaaagaagagaagtcataaaagag

SEQ ID NO: 395 - DNA, 396 bp, Homo sapiens
  misc_feature: n=a,t,g or c
aaaagaatntnattttatttagaaggtaaagcgttaagttaaggcagaatgatatacttttgacagtgagtaagaaaagttaattgttagttcatgtcaaattagtggtgtttggagtgggttgatgcacatttcattaaccagtaagcatgtgtcaacttgtttaaactacattttaaaagtcttctatagaataaatgtttcctgtctcactaagttaaaatatacaaacaaggggacagaatttgtcattaggttttgaccnaaaagganaaaaaaaactggcttcttggaaacttacggggggatccccgattttctcaattaccccttgggggggggctttcctatggncggggcccccctttggcaaaatttngggggggnccggttntt

SEQ ID NO: 396 - DNA, 318 bp, Homo sapiens
  misc_feature: n=a,t,g or c
gcaatttgtaaattctggtgaatactcaaaattgtagctaaaaacagctatctgaatataggtttaaaacctcaaagacacagagctaagaaatatggaatacattgtatattgctttttcaatagagtagacataaaattgatgacaaatgtttccaaaccctcaataagaactcaaaacatcatactatgccaagctgaattacagaagggtatctaaggaaagaaggacagtggcatcagttatctctaggataaaggggccagtaaaatcaagttggcatttgatgtatacatcttattggggngtggtttttc

SEQ ID NO: 397 - DNA, 441 bp, Homo sapiens
  misc_feature: n=a,t,g or c
caaatnttttttattgctattttcacccttaatgtatctttctacatagctttctcctnttggaacagtaatacatggggcagtacattattttcataaccttatgccatcaaatcaattaatacagatgcttgacacatttaattatacaaaatcaatttgcttcaagatacaaaattaatgttgatatgtaattaatgaaaaaaataaggatgttaaaaagataactataagantatccagatatatgctgtattcccacttatataggatctgatcaataaaacatcaacacattcacttaggatactggatttaatccagggatcagggccatattttcaaaggtattttaggggtgccgggggcactggcaaaggnggggggaaaggnggctgagggggacnacctatggnttgcttaaaccagggnccctggttt

SEQ ID NO: 398 - DNA, 402 bp, Homo sapiens
tttttttttttttttcttagttaatatctttaattttttatgtagaatatactatttttttctccaccaaaataacaatatatttgcaggcgggaacatgtatgattttaaatgcacttttgaaatcttagagtagaaccactactctagtaatacttgtaataaaattaaaatagttttaaacacttccataaagaattaggggtgcccagctccttgatttccccctagggataaagatatccatgtacaattccagggagcttccctgtaattcctcaaaaaaggcactagtaaaactcttaggagggatattaggataaaggctcacttaggcaatagccctttttccccacatattctgggagggttctacaaaagctatttggatactcattccgg

SEQ ID NO: 399 - DNA, 367 bp, Homo sapiens
  misc_feature: n=a,t,g or c
taatacaatcgtagtacagntatgaagtcacattcaatccactgaatatattcaaggtattaataaaaatattatacatctttattcactatcttaatataattaaagtatttggttcttataggtaagattaattaccatattcattcatatatgcactgctagtcaaacaacatgggaaatgaatgtatgggattatgatagtgggggttcagtcctttttgatctgaagtctaagtttcaaaagtgaatgttttcttttttaaatgtcacaatatttggaatcctaggaaaggaatagggccaacctaatttaagggcaagggtattggaaaccttttataccaaccttttaattttggaaaaa

SEQ ID NO: 400 - DNA, 284 bp, Homo sapiens
gctcatccggctgtgtggccttgggaagggcaggaacctctctgagcttcagtttcctcatctacgcaatggggctgtgcgagaacacaagccgttcatggagatgccactcctcaggtggaggctgccagctctgggctttggtgccagctgtcatttatgggaagagcaggccgccctgccctgggcctcatcagccccagcaggcccctctggcttcctcatggggccgtgtgaccgcaggggctttcctgacaaacatggggtgcgagtgttccagggga

SEQ ID NO: 401 - DNA, 472 bp, Homo sapiens
  misc_feature: n=a,t,g or c
ttttttttttcttttcccgtaactgaggaaacaagtacacatatttcttaaacaatgataaatacaatctgaatgtataatggtgtcaagtttgataacctgttgtatccattctacaataaggagacacccaccaaacagatattcccatcggccttttggggaatgttctctggaaagctcttaatagatgtaccttctaagtgctagaggcaatgttaggatgctgaaggacttatagnacaaaaacgtttcattctgccgataaacttggagtatggaaaatatcaagttaaccaactaggctacatgctacaacagagtagggcagagcgtgtttctgggctacacccagatctaggttctaaaaatnaatttcctaaagggagggtacttctggaatctaacctctgaagggtattacaaattttatncccagcaaaggcaaggttaggtgttgtaggtggggacc

SEQ ID NO: 402 - DNA, 307 bp, Homo sapiens
  misc_feature: n=a,t,g or c
ttttttttacatgagatattcaacattttattataaaacaggctttctgttagatgattttnctcaactttaggtgttctgagcatgtttaaggtaggctaggctaagccatgatgtttagtaggttaggggtattaagtgcattttcaaattaccatatttncaacttacaatagtttcaacgggaggtaaccccatcgtaagtgggagggaacatctagtgcctgggcacagaagccggttctcaataaatataactcttctccatcttcttcaaacctcagggccagggtttcagtgacctcct

SEQ ID NO: 403 - DNA, 333 bp, Homo sapiens
  misc_feature: n=a,t,g or c
gaaatcatttnntgntctttaatcatagcaaatgtgtttttacggtagtcataaaatcaacattaccacatatacaaaggacaagacaccagtttggcatacaaaaataccatatattaaaattgggttcattggaaaactcaggactggctaagacaccatctataacagagagagcaagcaagantgcttttaaggacattcagatttataaacaggcagcttgatatcccctttacgaggtcaatatttgggcaacatttggggccaatatttttctacacagcccggcaggctcatttatctgtagggggctatttgggncccttaaaa

SEQ ID NO: 404 - DNA, 421 bp, Homo sapiens
  misc_feature: n=a,t,g or c
tattccacaaacaagttttcaagaagacatctaagtgaacactgatacaaaacaatgaatggacatccatttgcaccaggtcttggaatgcattcagaggcagaggcttccagtttcacaagttactcagacattcctttagccagggctgccccagctccctcacagctgtcttgtctgtcactgggcgccagacctcctgacagaggcttccttcacttcagcctacctgccactggttatcgaggtgcttggggggtgcctgctgtggaccacgagggacttgccctttctccttccccaacaagctcctggggctgagtttgctgtcacagcatcccctccctttcctgaaggcatgcgatgggtttggnatgggccagatgtgggcagggcacagggacagctgggggccgncagc

SEQ ID NO: 405 - DNA, 446 bp, Homo sapiens
  misc_feature: n=a,t,g or c
cggataccctgggggcctctgctcctctctttgtggagacgtcgtttcaccggcggcgcgtgaccccggcagctgtccagagacccagagatgtccaatcacaggcgcacggtgcacaggcgcgcagggctgcctggaacgggcccaggcaggcagtgaccgggacctctccggagggagaggaacggtgccctcccgggaggagctggccaggcaggcgctgcccagggcggccttccctgctggactacggcattgcnactgagttatataaagacactatttggggaaggacagcgggtgaggactnggcgcggcggcacacgctttgcctgttgtnttcagctcttctgggggccaaggcagggagttccagggtttacagtgagcctgatngccaattgctttccaaaagagagaaacagagagaaagggattnaggcttc

SEQ ID NO: 406 - DNA, 343 bp, Homo sapiens
gattgggcccaggacagcagctgctttgtcaccaactccggggactatgagattctgtactgggacccggctacctgtaagcagatcaccagtgcggatgctgtgaggaacatggaatgggccacagctacttgtgtcctagggtttggggtgtttgggatctggtctgagggggcggacggcactgatatcaacgctgtggcccgctctcatgatgggaagttgctggcttcagctgatgactttggcaaagttcacctgtttagctacccctgctgtcagcctcgagccctcagccacaagtacggtgggaacacagcagccatgtggacaaatggtgggc

SEQ ID NO: 407 - DNA, 440 bp, Homo sapiens
  misc_feature: n=a,t,g or c
taaaccatatcatatatatttattttagaataatcactgaggtagcagggtagaagatgcattgnaaagggtggcaagaaagagggtactgaaaacaaagaagaagataatacaataattcagataggagatgactgggcctgaatttggctaatagcagttatgatggagagcagaggagggatgcacaagatacttggagatagaattagcatgactttgtgtaacccttgtaacaatcaggttcatcctcgccaaagacttactaggtaaggggacattctgtcctgtagtttatctctcaccaatttcaagaaaagtgaagattttacagataagtagaagagaggcaagtaggacaggtgccccccaggcttttaaataatgtgacctngaggcaggcttggaaggaatcngggaccattcgagttttttaaaaa

SEQ ID NO: 408 - DNA, 430 bp, Homo sapiens
  misc_feature: n=a,t,g or c
aatacagatatttattttctcactgttctaattaaaatagggattagcaggtttaattcctggtaagggctctcttggcttctccttgtgtcctcatgtggactttcctttgtgtgtgagcataggaagagacgtctctccttcctcttctcataagatcaccatttgtatcaaattagaatcacattcttatcgtcctcattgccctatgtccaaatacaatcacattgcaggttaaggggtgaattctggcaagttggagttggggtggggggtggcgcaggggttatataactccagaaatctcagtcacaagactctttacctgtccctaaacatagatatattaagttggccatnaaattgaaattccttcaggacatataaaaatttnaatgggtggagggacaagcagaaaaacaaggatgaa

SEQ ID NO: 409 - DNA, 549 bp, Homo sapiens
  misc_feature: n=a,t,g or c
gcacaacacaaagagtgaactttaatataaactatgaacactgtagctaataatgaatacaagttcatcagttgtaacaaagtgccatgctaatgcaacatgctaattagagggggaaatatgcaaagaagaggagggatatgggaatccctttgtgcctaatttttctgtaaacataaaactgctcttacaaataaagcctattaattaaaacaacaaaatacaaaacaacaactaaaaccaaaaacagccaacacccaatgggttgagctggagtaagaacaggctgcccagcacacttcctgggccactgagccctgggctngaaaagcaaaagggccagtgaggtttggctgggactcagctccccagcctctggttcaagcccgatttacgaacacaaaggtcatctggttggatttcctggtcccctcagctcactttaaggaggcttttctggtccacagctttgggttgccaaaagcaatctggctaaanggatttgggacatccggctggtgaatgtagggganggtttacccttagatg

SEQ ID NO: 410 - DNA, 601 bp, Homo sapiens
  misc_feature: n=a,t,g or c
tgtgtcaagccctgttctagaagtgggaagaaacaagtgaggaggaagggagcagttagaggggttcagagaagaccaatgtgaagagctgacatttcagctgaaatccaaataacaagaaagaaaacagccttgataaatctggacacacagcgctacaggcacaggaatagcatatgcaaaaatcctgaggtagaagctagcttaatattttcaagaaaataaagggaggtcactacctaaaaatcaatgattgtgggggaaatagggctcttgaaaatgtcaaaaagtttgacaaggtccagctcctggagggcttggattttattgtttggaataggaagccataggaggattttaagcaatggagtgatttcatcgaattctcagtagaaaaactattgcactggctgcagatgggaaaaaagttgaagggaagcaagagagtatacaggaggtccatcaccccagggggagagatggagagatgggtggcttagatcagggcaggagaatgggagatgggggagagttgatggacccaggatacatgtttgaggtaagccgatagantttgcccaaaagctttgagagaagatga

SEQ ID NO: 411 - DNA, 402 bp, Homo sapiens
ttcgacatataaccaaatgttatttaatatcttaaaaagtaacacaatccaaaatggatatttcacacaacactacataaacaacatgaacacagtatcaccatagggagggactttcaaatatagacttacaaaaatccctcgtccttttttttcttttaagttattatactaagcatgacaagtaatcatcatttacagtatggtacactgacacgataaaaaccatgttacaaatgtgctgttataaatcagtaacattagggaagacatttcatgaactgtaattatttcatatgaaatactatacaatataaacagaacatccatcttgggatgacctttacagcaaccagagaccaagtaatttaaaattttttttcagtgcaaacacattttatt

SEQ ID NO: 412 - DNA, 432 bp, Homo sapiens
  misc_feature: n=a,t,g or c
aggtttcaagtaagtgacttttatttttctctgacatttcacagtcaatttctgcaaaacttcatactttctcaaaagaattcacatttgctaaataaatttctaccctaaagaattcatagctgaaaaaccacttcaatatatgcacaaaagttacttttctgctaaaggaaccatagtagaaaataaaaagtcagacaatactataatcaataaaaaccaatgagtgtaataaattacaaatgtcattaaattccattcccataaccattgcaatcagcaacttttctatatatatttcaataatngccaacaaaatctgccaaaagttctcttaagggttgctctgagctaaaaatggcttctcaccttcagaaaacagcagctctgccacagtacttcatagccaattacgttattcatcgctaaaac

SEQ ID NO: 413 - DNA, 450 bp, Homo sapiens
  misc_feature: n=a,t,g or c
aataccattttgagagtaattttaaagactaatgcgaaagttcgggagcacattgtatatttgaaataagtgtagtgtgtgcaaagaccattttctacctgtggataaaaatcaattcccccaaaggcctaaaagcatgaacaatgtttattttcgagtaaataattaaactacatatttaacatggaaaaaattaaatgaatgtcaaaaccaaaattaagaactataagcaaagcatgcagtctctgttaacaaaacttagttgtgaaactacatttttcattttgtaaatgccattatttcatttcataaaatggtaaaaatcctcagtatcattctttacacttgatgcggcaaacacttcctttccctattttcctcggnatttcctgcaaaataaatctaccatctcaagttccntaatggttcatactttcttctcaacatatt

SEQ ID NO: 414 - DNA, 175 bp, Homo sapiens
taaaacaggcttactttcaacatccatttacaaacatttgttgaaaaatattttaggagtatttgtttaaacattattccgaatttactgctccataaagcctagtgaatatttaaattcttgaatatgttgccagaaaaagaagcagagatccaaaaacaagtatatgaccaga

SEQ ID NO: 415 - DNA, 395 bp, Homo sapiens
  misc_feature: n=a,t,g or c
tcagaaaactaaagcagcacctttattttatacatacaaacagtataaaatgtttattaggtaagagctgtgttttgtttacaatatattatattgcttcaagccaatgcaaaaagttcatacattatattccctatttcattgtgtttagaatatattatattgtttaaatgccantaccacagtgtaatttttttttttttaatactgaatctctggaataatggtaaggtcaaaatatattgtattgagagtttaaaaattaagagcaatttttaaaaatgtaacaaacatctaaatatctgacaataaaatctgaaatgctgtaacttcaacattaactgcaccatccaaattcttgtgacttacgcattttgccccatttaacctttctg

SEQ ID NO: 416 - DNA, 373 bp, Homo sapiens
  misc_feature: n=a,t,g or c
tttattcgtggggcttttgtacagagtgggctgcagcagttcttgcaataggcagtgagagaaatgaagttctctctaggtatgtccgtgggggagggggttggtgaatggaatttatatgagggtttgaggaatctggctcaggctgagtccagtttctttctgtgttttgagcaacaacctagttactgtcatctgtgcctgggaacgttcatggctatggctcgggttcaagtctgcagaggaaattatacagttggcgaagtcacagagtggccaagggactctgtttctcagtcagcactggggantgaaagtgggaaaggggaagcaggggtacgtcacaacctccaaaatcagggtgcccagccgc

SEQ ID NO: 417 - DNA, 285 bp, Homo sapiens
  misc_feature: n=a,t,g or c
tatttaataggaatttgtgttagttgtaacaatgtgtgtattgganccnaaacatgttatattttaagcaatggcttggagagaactaatcaattcatattctgcatttccagccaaagggacataggcacaactgactggtggcaccttcctgtgggaagcctcttccatccatctacagcattgatacttttataaagtatgaatttatcttgcttgaagagttaagtctcatttnccatgggntaatgcagggttgctccatacccgcttngcattntcccg

SEQ ID NO: 418 - DNA, 394 bp, Homo sapiens
  misc_feature: n=a,t,g or c
ttttaaaggcaggggtaaatctcaggaaagcagaagttacagtcgaaagtgtaaatcgacagttggaggttatacattggtttggcctaaaaaaggtggaatatcttgaagcaggagctcacaggtcataggtggaatcaaaaattctctgatttgtgactggttaggaaagtgaagctttgtctgaaatcctggggtaagccgaaaggaatgttaaggtctggcccgtgnatgacttcttccagggccttcaggaagaaatttagaacaaaggagggtngtcagaattcagtcctcagtttcccccatctgaggnccacgtnccagcngattcatttgggtgggggctctaggtttatttttaatacaccctcagagctnccaaanttggaac

SEQ ID NO: 419 - DNA, 195 bp, Homo sapiens
  misc_feature: n=a,t,g or c
atatcaagtgtnttttattttcacaaatattttaaaatgcagctacctttgagccacaaaaggaaaaagcagtattccttttatgtatttgatacaaatattaaacataactcagttttagttcattagctcagctcagtgaaaatagctcaggaaaaaaaagtcataggtaatgctattggtatatgcaggaaa

SEQ ID NO: 420 - DNA, 289 bp, Homo sapiens
  misc_feature: n=a,t,g or c
tttttttttctnaaggataatcaataatttatttctctttaattgtcacaattaccataattatctagctacatgaccaatgtcactacatatcacaggangattgtccacctacactttactgagacaaagacaatggccatttatgtgttaaatgtacaatgggatgttaacaccatttatgtgttaaatgtacaatgggatgttaaaagcagtggcttttatgtgtaagncaagatgtggcacatgatttattacggacaggtttgatttaaaatgtattntgccc

SEQ ID NO: 421 - DNA, 378 bp, Homo sapiens
tttttttttaatgtttaccttttaaaacatccaaatgtttattttcacaagcttagtagtacaagatgcaacataattcaagaaaatcaaccacagtgctaatactttaatatattattccaaatattagacgttacagtttaaatctttttaacattagctctaatgttggaataacatttaagttaataaataactgtgaatataaccatatgttcagtctattctccccagtttatcctaaatgacaattttattgtgatttgggtcataaaagtgataaataattgtttatatgttttcataaattgcatgtttatttaattaatcctggaagaggaacctaggaaatacattccatggggttacataaattcg

SEQ ID NO: 422 - DNA, 464 bp, Homo sapiens
  misc_feature: n=a,t,g or c
ttttttttttttttgaaaacagaattatttattgcatacagcatgggactgtgatcaacctggncatcaaatgccgcgatggctgacagggcccaggcggcgggagtgctgggaagcccagtacacgtgctccctctctgtgggactccgggatccacggggcggatggttctntgagttgcgagttgttcctgtttgtcttccagcccccagtcctccccggccactctgattagccagcctagggtagggcctggcataaagtcacacaggcaaaccccagaagaaggaaaaagggcacctgcatgaacaaagagttgggttgcagaggntgcaccggggtaagacttccttcatgcagttnggagtccncccatgtngggacatcaggagatgncaccncacagaattggtngctaggttttnctgggttttggcccagagaggctnattcccattntttt

SEQ ID NO: 423 - DNA, 318 bp, Homo sapiens
  misc_feature: n=a,t,g or c
ttttttttttggttttactagtttggaagcagttttaatgaagatggaaatgtttatcaactcaacacaggtacccccaaaatacaaatcaaaatatcatcttcagctgcatagcaaatatgatttaagaatttaacatcattatttgatcacaagcgtaaatatgtcaccataaataaatgtaaattcattgtacaaaaattcccaacaactcttaatacaaatatgggtacatttgacagtttctgaaacaggattatttttaaaactttttaaaacctaaggctttatttttttccggggntattggacacacac

SEQ ID NO: 424 - DNA, 363 bp, Homo sapiens
  misc_feature: n=a,t,g or c
ttttttttttttttttattatatgaaaactgtttattctatagcctactgggaattggccagaagttagaaggacattggaaatgacttttaaatctccatttgagaaaaagcatgccatgagtctaaataaccaatttcatttagcaaacaaaatacaagtaaacaaaacacaacttctctgatgnaatgaagtggttaccatattttttcccattgtgtaaaggatagttctcatatggaaatatatcacctaaggcagtagttaatcaggaatattctggcaaacttattggggggtaatttaaaccccaaatcgggaaggnataggantaaaaggacattaaaggtcttttctttcaaa

SEQ ID NO: 425 - DNA, 342 bp, Homo sapiens
  misc_feature: n=a,t,g or c
tttttttttttntttttttttttttnctgggctcataaatatgtaataatcccctctcttggcagagtccagaatagaaaggagatacatacaacccagggcacaagctggagagacacatcatctagctcataggcccagagatatgtgataatatcccctnttgacagggcccaggnagaagagtcacattcatatgattctgacgcagtgatatgtaacaatgcacccntggaaaggattttaaggattaaagtntcaacacctggggtactaggcccagtgatntgacacantctcatcatctttgagggtgacacctttaacttttaggctgagtgt

SEQ ID NO: 426 - DNA, 376 bp, Homo sapiens
tttttttttcagcaattgccagttccttatttatttcttgaaatgaatgaactaagaaaaaagtgccaattgttctttccagagatcatgcattctgatagagaagatgcaggaatcccttttctaaaatgtgtctgcaaagctgcttgctccagagttgagcatgtgctgctcaggccacctgggtgagggtagagggcgtcttagttagacatatgtatatttaaaaatactccctcaccccatgacatgcatggcaggaggcccttttcttaaattttttttccggggggtgataaccactatttaccactttttatttcaatatctgggggtctccttgctctccctcttttgactgggtgtgtgtgtgtgc

SEQ ID NO: 427 - DNA, 482 bp, Homo sapiens
  misc_feature: n=a,t,g or c
ttttttttttttttggtgtctaatacttttacttcccagcagcataataccactttggtcaggttgaaccactgcacaattttgcagctctttcagaaaaataatgaaaacaattggaaagacatgatgtacatgcaaatggtgagaaaatgatactattgtccaatcctttcccgtaaatgtaaaatatccttagttcatctccaaactgtgtatttattataagcccttacatcagggattttgtttctttcagtttttgtagcaccaaatagacacagcggctaacaagaaataaatctgaaaagtcactgaaatatttatcacatgtcaggaaattttctggtctgtacctttaaccatgttcctgggcttcacatattcttcttaagngtaagctataacataaggttgagttcccacccgtgtttggctaccgntgtggtttgtttacctggataatactttgttaatatcctttg

SEQ ID NO: 428 - DNA, 420 bp, Homo sapiens
  misc_feature: n=a,t,g or c
tttttttttagcttaaagacatgaaaaacccagtgagtttttattgaatagtctctcttgtgttaaaagtacatattcaggactatactatgttgtatttggaaatattctgatgtgtttaatacaaattcgtagtgtattcagagcattgtatgtgtctcaccaatggtacacatttggattaagcagtaataaggcctataaaagaaggaaatgaaacaatagttttcaacaataaatggcagggaaggaaaaactgctggatgggncccaactgaggaaaatgtccttttacactatcccttgggtgggtcaggtctccctggaatctgggtgtggcttattaattgctgggggaagggcaggtgttaaacctgtgggcccattccnctggcctgttctgggggggggccncagccc

SEQ ID NO: 429 - DNA, 336 bp, Homo sapiens
  misc_feature: n=a,t,g or c
tttttttttgctgtatctttctttattggtttggggaaaactggagggggctggaaggccatgaccatgacacaagcaggaccacccacactcagcgacacacaacagccgtgcaggaaagacagcccctgaggcccgcctgccagcaccccctcggcttttggcggggcngggggggcaggggcgggagaggcaacaggggaggggagccantgcccccaggcaggcagagctggggacaganttnggggtnccccattncaaccccagcgccatgccaacaccctcaaatttcaaaatccagcagaggccagncccaggggnagggnttttggg

SEQ ID NO: 430 - DNA, 397 bp, Homo sapiens
tttttttttttaatgatgttcatttatttaaacgatctgtatgaatttggtgattttgtggatacgcccctgacagacaaggattcacagccgacggaagtcagggaggctccctgcaaattcttcatctccgcggggcctgcccgagccctgatcctgcagagccgtggggctgaggtagccgccggttgtggtccagggagtgcgtctttctggatgcggggcaccttcatttcaccgtagcaaccgggtaccaaaagtagaagcggatttttggaaaatgagtcattaggtcccaaagagaacctattgcaacatgggactccataacgttcttgaggatcatcctgaggaaactgatgttctctcgttagacaaaaatggcacgattttgctt

SEQ ID NO: 431 - DNA, 333 bp, Homo sapiens
  misc_feature: n=a,t,g or c
nacattgtatttattttcatgttttaccttctattgatggcaaatgagactggttttccatttacagaagtgatacaaaagattcctgttgcaataatttcattaagtgaataatgagccaatttaaagaaaaatataaagcaaataattntacagatggnaaactaatatggcaaaatcactaatattcaaggctgaagtttggccgggcatggtggctcatggctgtaatcccaacactctgagagatggggatgagtgggctctctcgagcccagggntttaaagaccagcctggggcaacataggcaagaccctgtntctaaaaaaaaa

SEQ ID NO: 432 - DNA, 357 bp, Homo sapiens
  misc_feature: n=a,t,g or c
ttttttttttatgagtaataaatatattttgctttattttcaatttgatatatggaaatttcatcagaagacttgactgcagtgttacttacaacttagaatgacaaaaaattcagctctctggtttttcaaaggtaataaagattatactaactcaatggcttaaataagagcttgttaaccaaacacaaatattttactgacaaactaggaatttaggtattatgaaggagaaaacaattttcacagacacccactctcttagtctaagggatgaggaatttatttcaaagttatacaagtgccaaagganatagatctaggaggcagcnggggtttcaaatgagccaaaaatgg

SEQ ID NO: 433 - DNA, 364 bp, Homo sapiens
  misc_feature: n=a,t,g or c
atagtcaaagtngcagcagctcatttatttagccaaaaatagatactttctcgtacaatttggttcacacatatgtacatttctctgtatatatacacacacacaaaggcagacacgtttattctcactgaaactccaccccccaaaatcaaccggacaaacaaacctcacagcgaatggngngtgccacagaagcgacttggggagggctgaggaggactggttttatttctttttcttactttctttgtttagttttgcttttagggtatttatacacgggacatgcttacaagttgtaactatacagnggcgattttttttatacaattatttacaacggtttaaaaaaggttttttttgt

SEQ ID NO: 434 - DNA, 551 bp, Homo sapiens
  misc_feature: n=a,t,g or c
ttttttttctgcctctatattttaattatagtctcttctgtttataaacaataacttacacatatttttcatagttttaagtaaagattaaataatgccatcttagaaaggatctgtttaacctatattataaaagttagatacacaatttggtacattaaatgaaaatgtcatttgcatatatagaacctgttctgttttacacagtatcataatagctacagctactacaagaaatatggttaatggaagtcaaacatttagtacgatgcttaaagagttactttaataatgccctcttatttttctagttagatagcaactatatttcccagacaaggcaaggaaaatatatgggggccattttttataaatttaaaagtaggctaggcacaatccaaccacggcaactttttttggaaatagcttgcaatgctatggnttccaaagtggtccaggtactgaagggcaaaatgggctggataggatgggaatgtaggccagtgggcnggtaggctctaggntggatttgttacnggtggtntttagcc

SEQ ID NO: 435 - DNA, 392 bp, Homo sapiens
tacaaaaaaatgctttatttaaaaatatgatctttttaaaaaggagacttttatacacacttactttagaaacagtcaaaaacacaacagaatcaatccagatttagaaatgatgatttgtaacatacaatattggtatgctgaacaagacagtttaaatgtatgattctttttgtcccttcacatttcaataattcacatttgttaaaactagtggttggggactaaagaaaaggtcatatctgaatcctttccccttcaggaaatctgtcacccttctggggcagttacaggaaatgggcaggcagctagggcaatgtttgtatttctttgggggtgcctctggtggtccaaaaaatatatctccgcttttattctttttctatggaaat

SEQ ID NO: 436 - DNA, 386 bp, Homo sapiens
  misc_feature: n=a,t,g or c
aattatatnntacatttattcattcagtaaatgtgttttgttagttcatgtcttttattaactcatacacaattaattgtcttctggtttgctgaagcaatgagacatttgtcacaataatgtctgtcaaagtggctggccataaacgctccagtaccacattcatctgaagagcactctagatgaaggcgacttattttgccattctcatccaccttacagtatttcaggacagccagcttcaccttctttcgcttacggcttattcttctcggggtgggtgtaaacattcaggtaaaaaataattgaatatctaaggtgccncggtactgttcccggtactgnagggtacnataggngggattaaaacngggcggggtnctctt

SEQ ID NO: 437 - DNA, 436 bp, Homo sapiens
  misc_feature: n=a,t,g or c
ctgcaaaggcataattnaaatnacgaggtcccatgctgaggttctgggtggacatgaactcgtggggggttcctcgacccagagcacccacattacgacgacaacaaaatctcactgaagtaacccatgctcctcgcctttctcctgcccgctagcatgcccccggagtccccaagatcctgggtggggaaccgcctgcacctgggcgttcaagcgggcaggtcccacggagcaggcccagggctaacgccgaggcgcctgggngtgaacctttctttgaggtcagccctctgtggcaatttcaacatcacagagtcgtttcacggagctgggccagggattcgtgcttgcttgcggcatggggatgggaccggctcttggcggccgagcaaaggtgctgagtttgcaagacctttgttgccnggcgtctnttctt

SEQ ID NO: 438 - DNA, 519 bp, Homo sapiens
  misc_feature: n=a,t,g or c
aacatgaagatcactttattttcaaggagtaaggggaatggtaatggggtagatttaacagcaaatgaaccactgcacaaaactgaaaggatttctcctatgacatttagtttcacttcttttccatttaggacactagctgctgtaatctcggtactacttttttttaagttatcttccccaagcagtgttacaatccagctggaatgggcattagatatacacatcattagactcttaaaaagaggcccgatggctctcgatttaaccagaatattaaaaaagaaaatatatgtacacacatataaatatatttaagttcacacttttttattttttatttatttatttatttattgagacagggtttcactctcgttgcccaggggtagagtgcaatggcatgatctcggctcactgcaacctccacctcccggggttcaagcgattttcccacctcagcctcctgagtagcttgggttgncagggatgtccaccacacctggggtntttttgttt

SEQ ID NO: 439 - DNA, 401 bp, Homo sapiens
  misc_feature: n=a,t,g or c
acagtaccatagtattccactgtctagtatactataagtganctatataccaataatgaatacttaaggttgtttcaaatcttttattattagaaaagtgctgccagaaacatccttgccatgcttctgtatgtactggtgctagtgtttctatcagataaatttttagacatgaagtgaattactaggcataggnaatataatttacacttttgatagatactgagtttttgctcatttgctacatgaagcagaggcagagtattctgtgtggggtttgggacaggaacactgacccctgaagtcgagccggggggtctaacataggtgggtcatttgtccagcctgttttatgggaagggaactgggactctgagctttggggggaatttcccgcaagg

SEQ ID NO: 440 - DNA, 252 bp, Homo sapiens
  misc_feature: n=a,t,g or c
nnnccttattttccttcaaaaaatagtttattctgcacatttcctagtaggctctctgcccaccgttccagggtagcagctactcataacttgtctttctctccaaaaccaagagggccttcccaacagaaaaaccttcagttcccaaagcagcatcgattcttcccctcaccccagcaaacctcggggtgggaataatgaatcattcaccttctcccacccctcactgccccgccccaccttcatttgccg

SEQ ID NO: 441 - DNA, 319 bp, Homo sapiens
  misc_feature: n=a,t,g or c
tttagcggtctgccttcatcttttaatggccggtgcggtacagttagtggacagacgggggatgggacacagcaggggtgaaacagggcagtcacagccggggccggggatctggaagcggggggggtcctccccctggaaacaccgtctctggaaggacacccttaggatcccctgacctcagggtgccacccacacgggcctggtgttctgggagggccgggctggagtgaccccagcccctccctacgttccagggacccttgggtctgtcgagtccccttggtggatgagggtcaagacctaggtcaagctgact

SEQ ID NO: 442 - DNA, 461 bp, Homo sapiens
  misc_feature: n=a,t,g or c
tggctaaaataatggtgtttattttctttaaatacacttaaatatgaaacatcagatggtagttcattaaactggaagactataagctggacagtaatcagaaagtcagtactgatcatacgaatcaaattctgcataaaaaagaatcagaataattcacaagagttgcgattagaaaggactcagagactacagttttcctcatctgctctgagtaatcagtcatatgacacctgccattccatgaccagcacacctttctcattcaccaaaaaacaaaaacaaaactaaacaaaaggnttacatggggtcccctcctctccattccttgggtgcgcagaggcatctgcagctaggagggcatccntcaatgaccgggggctccttggctgggtgtgatgggaggttgggcttggattcactgtggggctgtgtnaatggggttttttttttacactggg

SEQ ID NO: 443 - DNA, 537 bp, Homo sapiens
  misc_feature: n=a,t,g or c
acattttatttataacaggaaaaatatatccctctatattttagtttaaaaaaatactgcttggaagcagcccatatcctgtgcgttttgtgaattttcaggtgagactccctcaacccgctttcccccctcactgccacaccactgctagtccatggggagggggctggggttcaggtgggacctcttggttgggagcctccattgctactttgcatttaaaggaccgagagtctcctcaagacaagaccactgttatgtgatggatggggggtgtctgttgctggatccagttccaaaaggtgcccagggaacctggggaaggtgactaccctatcatctcacagggactccccacactgggaaccccagcctcctggggtcctgggtccaggggctcttttcccctgggctgggtccatgggttgcgacacccacggcacccgggcattccacgntggtncttcgaggggagggcttnagagggctaagctncaccttctntttccctggggtngccagattcantccttncct

SEQ ID NO: 444 - DNA, 434 bp, Homo sapiens
  misc_feature: n=a,t,g or c
ttattttacaaccaacaatatttaatatttccacattgaagaatagatgtgataattaaatcttttataaggttttaaaaagacatgaaacataaacctaattatacataaaagaaaagaattttaaacaagagcttattgtgatgacattactcataacttttacctttaaaaccttttcttgggtagctattcaaaagtaaagaccacaagttttgttgcccagatttcttatgttttgtatatttaagctctttatttattgaacagatgtgtcattaattcatttgggggcattactnttatcaggtaaaatttggattttttttcccctcaggtcataggggaaatcagctcccccnggggnatttctaaggggcccccgtttttaggnccaatatttttccagggaatcctggccncggggccggatt

SEQ ID NO: 445 - DNA, 263 bp, Homo sapiens
  misc_feature: n=a,t,g or c
cactcaataattttaattgtcctaaccttcaatttcactgattcccttcttctgcctgccaaatctgcctctgaaaccctctattgaatttttcattttagttactgtacttttcagctccagaattccttttcattttcttttcaggntttctatctctttactgttatttccattttgttaatacattttgtcttgatgttccccacatactcctttaggggctttcaatgtctttaacacagntggttttaagggctttg

SEQ ID NO: 446 - DNA, 439 bp, Homo sapiens
  misc_feature: n=a,t,g or c
ttttttttttttttttatagaagtactctgatttttattgttatacaacatatatatataattgtttccccaaaatatgcacaattacatgtgtcaattttaaaaaatgaatgaagactataatgtaaaacctatagctgtaaaattcctagcacaatacagaagggtgaagcttcatgacaactggtcgtggcaataatttgggggacgtaacatcaacggatgagacaacaaaagcaagggaatacacatggtactgaatcagtgtatgaaaaatatcccaaacagacaaagcagaacatggaatagatatatngcacattgtagtattagtcacaaacatgttaccttggaagcaaatgtacccttaaggattgagttagattcagcaaacagggcacgtacaatcactggggatagcattcagccttaaaaataa

SEQ ID NO: 447 - DNA, 350 bp, Homo sapiens
gctttttaaaggtgctttattaacttcactataatgagcatctttccatgcaataggtaaaattcttctgctaacaaaaatcttacagactggttcaaaaacacaatattcaattagaagctggtaataggagacccacgtaaacaagtgacaggtaaaggtttacaacaagggcacatcatgaacatgtaaattcgaaagcaggggtctgtttccgtaataactttagggaaaccatcaggattcagggcataaggcaaaactcatcatgatggtcatggtgaggggggtcagtgctgactgcccgcagactatgactcaactgcttttccctcagcttttccatcagc

SEQ ID NO: 448 - DNA, 411 bp, Homo sapiens
ttgttgtgtgtgtgtgttttttctttttaagtacaaaaaaatcaaagcatacagggctctggcaactgtcaccaagaagcagagcctggggctgcctcctacacccattctcccacctgtccctgcccagctgcctttagggtaaaggagaccccttcttagagcagctcagactgtgctctgcagagcgccaggcattctgggggtgtctagcagtggaggacagtgcccccgccctgactccatccacgggaaggtacccgctatctatttcaaacactgcttccctgaaagacatcacttggaaaaagggagccttggttaaaggagaacatgaaaagccactaattaacaaataaaggaggcacccaagctacaggactggattcctggatggaaagagggaagccg

SEQ ID NO: 449 - DNA, 446 bp, Homo sapiens
aaaagggagagtgaggctttttattgtgtatgaattcacgtggtatcgacaactccacacaatattaaaacactgcgagaaagtgggtgcggcacacctggaattttaaaaaagtcagaaataaaaacaaccagacatcccaatgcagatggcatagaacctgctagaaccacaggcggcggctggaaacaggagacaggtctttacgaaggttagatgggcagcggttccgtggacagaggaggaggcgcggctggccggcatatggcttctgtgcagagggcctggcctcaggcgttgggactttttaataagtgaccccttgaggaagggcgtggtgggctccacctcccacccggaagcccccccgggtccactcacgggcggacaggtgtgtgacggccctctcctacctgccccagaacttgggcaggacgggctgttaa

SEQ ID NO: 450 - DNA, 322 bp, Homo sapiens
  misc_feature: n=a,t,g or c
ttatacttaataattttattacatgtacacacaaaatcatagcaaaatatgatatattttataggatttttttgtcttttcatgatgccatcgaatatttgcaaatgcctaaatggaaccctttcttcattctccacacaagtccaaaaacacaaacacacacgcacacacatacacctatacacatgcatccttttaaccaaaggtaatactcactggtgttaaaactaacagctctactggacaatggcttcatggacattttagaggcagtcttaagtctgctgtgggcacaggcatgtcggatatgatttccctgcag

SEQ ID NO: 451 - DNA, 285 bp, Homo sapiens
  misc_feature: n=a,t,g or c
aaagttctgattggctactgtaaaggcaatcttagaagatgcatgtaaatataatataaatcaactttcttatcaattagacattttccccactcacatctcttagtttttagggtattcagtcccagcaaccaaaaaaaaaaatgtaaatcatattttgtttctggctaatgttcaatcagttttncttttataagagcttttgatgtactgtttctacggttctttaggcacttacacataaaaacattcagagggttttccccttaacacacaacttttaat

SEQ ID NO: 452 - DNA, 324 bp, Homo sapiens
aagaaataagaaaatttattagatggattatcaagcagtaaacaacatttttgggagggaaataagaaaaacaagtgtgacctcatactgggttctggttagaacacagccactagaacaaactccagtctttttcagtctgttgctgtacttcagatttaaaatctgggaatgagcatgcagcaatgctccaccagatgaggaagaaaagctgttaaaaggaactcaggatgttgttaggaagggggagtggatgccaggccttcaccagactatccagaagccattccatggggtatttggtctgcatactgtgagacactg

SEQ ID NO: 453 - DNA, 320 bp, Homo sapiens
tttacctttctgaagaaaaaactttttatgacttcaatgacatgttatttttaagcagcagcggaagtcttaaacacctttacatgcttcgaaatactgttgatgatctgattttcaatactgtattgggtgccattaaagagaccattgttctttgaatcagtctctgtgttgctgtgggaaacacggtaaggcagaagcactagaatcatggaggcaaattactgaaacactgtgatactgaaatactgctggattctggaataatcttctgacatgtggaattagacatctgaagtgtcgctccaatcagtcacagt

SEQ ID NO: 454 - DNA, 443 bp, Homo sapiens
ttttttaacctgcattatcgtttattgtgatcctaattcggtccacagtaacaattgaaactgcctcgactaaattttaagtttctggggcagcaccacctgaaggcagtgactgcctttttaaaagacagggttctgacattcagagatttctgtttctctatccatcatttttgggcatcttgaatcacctgatttagagtcagtgacatcctgactggattggttctgctctcgctgggcgggtgagacccccagacccacgtccacagtgcacctgatgttctcccagcggtcgtcacttccccaaggaggccaggtaggcataccagaacagagctgccaggttggcgaagagcacccggaacttcagagggacgtagttggatgttgatgaactgtagtggcgtccacacccgccagttcatcctcagcgccggcca

SEQ ID NO: 455 - DNA, 228 bp, Homo sapiens
ttgctccttcaggacatttattcagttactgtatactgaagccacagagaatctcaaatttgacctcgctttctcctttgatccaccaacacagattctaagtccaatcaagagctgcttttgataggaaaaagagttaattggagtgctatttctgccttttataaatcctcccatagggggttcagggtaacacagttcccagacttttggggtgtgctcctaaac

SEQ ID NO: 456 - DNA, 465 bp, Homo sapiens
  misc_feature: n=a,t,g or c
ggaccggggcacgctttaatcgggagggctggagcagagggcggccccnganggngtngtgtcagtgtgggcggcttgnggggccgagtccgctggtgggctgnacccaaggggagcagccagtagggaagttgggcgagttccagaatcagggggcgtggctgtgtggctgtggcctccgtggggtgggcggggcttacatgccgggcaccaccccattggtctccatgttggtgaaggttaccccgcaagttctgctcctcctcgaaagccttgaacagtgagttgaagttgccggctccaaaaccctnggtggttgttggcgctggatgacttccaggaagagcgtgggccggtcctgcaccggtttgggtgaagatctgcaggaggtagcctttctcgtcgtagtccaccaggattttcagctcctccaagggcatcaatgttctccttcaacttgatctt

SEQ ID NO: 457 - DNA, 427 bp, Homo sapiens
gtttacatcatattttattttattacagtcaataaatatacttttatatatgaaatcattatagaatacatattttaaggcactaagtctcaaaagtgaaggcacctgttatactttgctctctaatttgacacattaaaacatgagaggtaaatctgccaatttattttgagtttgcaagcttacaatttaatagaataaatcaggtagcttcagaaatcaactaagaaaattaacaggctagagtctgaactaataatcttgacatggtttgattatcacttggtttattctgattactcatttaccttttcatttatgaatctaaactgacaattccacctttagaggtataatagagctattaaccgatgagacacatctactcattctctggtaactctgggacatcgcatcttgctttaaa

SEQ ID NO: 458 - DNA, 364 bp, Homo sapiens
  misc_feature: n=a,t,g or c
atacatgtttattncaaaaccacaagcacagtaaccataatgtcaacataaccgtatttcctaacggaacaggagatcgccatgcctaagtgcgtgcgtttnccaaagaaatggcggcttatttggaagctcacacgctgcaagtgatgacgagaagccctgttgtgaactaggagttctaaaccattaaacatttaattaccactttggcaaagcaatgcacattaccatttctacaattggaacagcacaggagattttaaaatgcatctttattttttagaatcttcagtatncacaatgtgtaaaatgangcagcattttaagtaaagctctatgccaaaaacagtttcttaaaaaagtc

SEQ ID NO: 459 - DNA, 430 bp, Homo sapiens
  misc_feature: n=a,t,g or c
aatnagttctttgatgctgtctagagaggtcaagggctgcttcagacccagaactgcgtccgcaaacacagagtcaggtgacaacagacaaatatagctggaaatatcaggaattaaaattacatggaggagaaaggaaacaagggagatacaaaggctagtccttttcctgactcaaattgctgattgccatcaatatgccttgatgttagtcagttatccaaaagtctttgtttcacttgcacaactgatccctcccacaaggccctccaagaatggtttgttacaaggcctgccaacagcaatggcaaagaccaagggcctcctgaagctataatgtgtcctgtaaagaaatgatgccagattttctcttatccgaatccctgttctatatccaggaatccctcatgggtttttgtatctggtactg

SEQ ID NO: 460 - DNA, 426 bp, Homo sapiens
aagagggtcaatgaattcgttgtttaaatgaattcaggtgggaaaccaggggcttagactagggctgtgacaatggggatagaaagaggagctgaacgggagagaggtttcggaggtagtgtcaatgggcaatggtggccacgtggctttgagttatggtctgacaagctctctgtacacctgccagggagggagggcagggtgctctccaagtcgcaccttattaaatcctcacaacacctcggcaaggatgcacctgctttcccagttacagatcaagaaaccgagactcaaagagagtaagcaacttgcccaaagtcataaagagtagagatgaagtttgaatccaggtctgtctgctttctttcatcttgatgtctctctgggaaggacttagctgcacaggaaagcctggatggatttgga

SEQ ID NO: 461 - DNA, 413 bp, Homo sapiens
tatttattctattattattattttgttattgttattactcaaatgactaaaacaaactttaaaaattagtttttactaatacctttcattaaagacacatgatggcccagatatctacaggtatccaggggaaattaatctggaattaaattaaatctgctgtggtttatacacagggtggataaaagcttctgatcttaaaacaggaataagaccatttgttcatgggataggttaaaaatagatacttaatgtatacatattcaattcaaataaagaggatgtcacataaaaattatgggaggccattgttttggactgagtacttggactaggctcaactggccagaccaaaccagaatggagtcactcattaatgtaattaatcaaactctaaaatgagccaatattcc

SEQ ID NO: 462 - DNA, 438 bp, Homo sapiens
ttagtgtcaatctttatcaatttatttcatacaaaacagtagcaatgtagaatgtggggttatcttctgctgccacacacgcgaaactgtgaacattccaagccagtgtacagtttaaaagggaggctaaacaatagcattaaccatgctactgaacacaggaactttttatttaaaaagattaaaaattagatagcaacgtcttcttaatattgctctcatcattgaagacttaaaagtgactttataggtttaaaaaaaaggaggaaagaggaaaaaccgagaggctgctacaacactgccatatagtcaaaccatcatacttccatatttgcatacttgatagcagcagtatttttactgaaccgtgagcagctacctatagaaacacaaagcgaaattctatggcagttattgaccaagggcccaaaggagaac

SEQ ID NO: 463 - DNA, 403 bp, Homo sapiens
gtgcagtggcgcgatcttggctcactgcaagctccgcctcctgggttcacaccattctccagcctcagcctcccaagctgctgggactacaggcgcccaccaccacgccaagctaattttttgtatttttttagtagagacagggtttcactgtgttagccaggatggtctcaatctcccaaccttgtgatccacccacctcggcctcccaaagtgctgggattacaggcgtgacacttgtgcctggactaaaacaatgctttctaaagcgcattctgcagcctgatgtgcctgtgaggtgagaggtgtgggagggacagaagctttgttcaaagaggtttgggagaggctggatacttagctcccttcttgtaagtttgccacacacattggcatattaaaa

SEQ ID NO: 464 - DNA, 323 bp, Homo sapiens
  misc_feature: n=a,t,g or c
gtgacatgttttttgctttattgaaattctctcttacaaaaggtctgangtattttaggccaggcctaatttgctttggtccctgaaatgcaggcccatggtcatttccatgtcctctgaagtaggtatgtaaactagtagacttccatttttaaggttcacacactttttaacattgtttttatttgatgtaaaacaagacttatgttgtccctaatggaaagaccaagtaagagagttatgtgcgtcttcatggaagggataactggattctttgccagaaccgggttgggaatttagtttgttcaatgtggcatctttca

SEQ ID NO: 465 - DNA, 627 bp, Homo sapiens
  misc_feature: n=a,t,g or c
ttattgaaaaagtacaaatagaaatgtttcagaatgtcttaagttttatctacctagcaaataccaatttataattatgtaacagtgcagatctagaatgtgtacaggtactttgggagtaaccagaagagcatttcttgtcttcaaagagattaagcatgacaaatttgaatactgacttagataataggttttaattatatctaaaagtctatgttgatattgatcctctggcagttcctctactagactccagccaggggtcagaactgctgtctcactcttaatacattaccctatccattcatctggcaaattactttccaatagtttggcatgtgtatttatgacaaaggttgattacaaattctacactgagggagggttactaaaaccagacnggaaaaccaacctggaattaaatcatttaattcngaatagaaattacggattttaaatnccggtaggattataactttcattttggaattgggtacatatacttggcagactggctcttangctatgggaagctgcttgggaaataagccggatcttccagttactccngttttaatggccnccgtacnaaatttccttgggggggaaaaagntctaaaaagactg

SEQ ID NO: 466 - DNA, 593 bp, Homo sapiens
  misc_feature: n=a,t,g or c
ttctcaatgcacataaagttttattagaacatatccatgatcatttgttcacgtacagtattgtctatagctgctcttacaataccacagcagaggtgactaactacaacagacactgtgaacaccacgtaaggctgtctagcccttaccaaaaaagtttgccaatccctcaatagttcatcctttccccccatgatctgcagtactgtctctgttgtaaattagagtttcatttatttgtgggtctgttttggaaatttggctcaatccattggccaatttaactatctctacaccaaaaatacactatcttgatcacaataataatttataataagccttaataataacacaagtctccctgcctgatgttccttctttgttaatgaaatagctaaccctgcctctttacttttccaaatacatttcagaatctggcttccaattccaggaaagaccttgttgggatttggtttggaatcacattgaatccataggtgagttttgaaagaaactgacatacttatgccattgaggctccatccattaatgatatatcncctccattatgaggtctcttnaagtcctcaata

SEQ ID NO: 467 - DNA, 409 bp, Homo sapiens
  misc_feature: n=a,t,g or c
tccaagccgcctggtcctgggtgctttgtcttggcagccatagcagatgaatgcactggcgtttggtgaaaaactggcaggctttgagggagtgagtcaagtgcatgggaagggaaggccctctgcatangntccagggtggtggcctgagnaagcgtgtgcccaccacacagcaccgtgagagaagccggccagctggagcagtgcacggcacgtgagtgangtgggagatgaggtcagagagatggggggcaccttggctttgaccctgagtgagaagggctcaccggaagagttgcaagcagatggggggatggacttctggcctttatgttctttaganggtccctccggagcctgtgntttacctcattaaaggggcccaagggtaaaaagttnaaaaggccna

SEQ ID NO: 468 - DNA, 587 bp, Homo sapiens
  misc_feature: n=a,t,g or c
catttagtcaaatatttatttgaactcatacaaagtttagtgacataatttaaaaggtgaagaactaaaacgcattccaaatattgaccaaaatactgtaggaagtagcttgggaaacttttcatcaaaatcgttaggcacattgccatatcattctccataaaatcatatccctcctcaaaaccacaccctccaggtgttgaatttatgggctaatttgttctgtgaggtgccaaaaatgaagataaagtaagaaatacagccaactagaaggaagagatataaatgtacaaacaggccatttctgctagagtctcaggcattcaggaggttcacaatcatcatacaaatatataaaattttagtgagctattgaatccatcttctgcctctttatttcttcacatcaatccttttttcttcctactactggtcagctttggggacatattttaggttcacttttaatattctggatttccgatagattgactgcaggnccgggaggttcctcgctccnggaattggcttcttctcctcatccgaggtgggaggacaccctcctccacttcgggggacattctttt

SEQ ID NO: 469 - DNA, 448 bp, Homo sapiens
  misc_feature: n=a,t,g or c
aatggatagccagttttaatgaacagaggatactgattggtataaaaaggtgtgtttgtcactgaggtgtcctcattttctagatgaggagttgtcttctccatggtcttgaacgcctgcttcgccatggcaccagcgtctgggtgcacgctggctgtcgccacagggcaggagctgctcatggaaaggtgtgtgcccctagtgtgcagcactggtcagcttttccacatagtaacaacagccttgttctgggcctgagaaggcctcaaaggtagacgaaaaggaaccatggccaaatgcctatcaatcagcccggtacctaatgtaacccatgacccanntgtgagggaggctgtagctttcaccctttcagccctttccctcaagcaatgtggttctcagttttagggcagagcttcttaagattcactttctgggcgtttagggg

SEQ ID NO: 470 - DNA, 305 bp, Homo sapiens
ttttttttttgagttttcatattttttatttaagaaaatacttgaattgccttagacaatattaaatatttaaacaacatgagaaagagtgccagaggtcagaacatagtatttagttcactgagttgccctgacagataatgaatggggattgatttaatagtgaccaaatacactggccatatttactaaagtgctgtaaaatggccaagtgaggacaactgcatctaaaatgagatcaaatcctcgagtccattccttttagcagaaatgattaaaaccatcttggcaggaccaagtctttg

SEQ ID NO: 471 - DNA, 305 bp, Homo sapiens
tagttagaaattacaagtttatttttatattttgaaaaaggcataatagaaaacaaaaataaacaaccaggcatatcaatatttgtgacatacacatacacacaaaaatgaatataggaaataacacgaagaaaaagcatagtatgttttgaaaccaacgtggggtatgaacagatttttgatgaaatacaactaaaggttttaagtgtctatgtaatgttcgagatattacgatcactcttatcctactagcaaaaattagcaaactaggctttaaaacatgattcctgttgttttagcaggat

SEQ ID NO: 472 - DNA, 506 bp, Homo sapiens
  misc_feature: n=a,t,g or c
gcggccgcgtgtgctgctcggtgcccagcgaggtgcggcgcatgaactggcggtgcatgcggacagcgcgcccgacacaagcacgttgcagaggacggtggcgagaatgaggaaggagctgaagcccgcgtacatgtaggagtaggcggcgtgcgcgatcacgttggtggtccagtcgatgaagcaccaggtgtctgggtactgcagccgcgagctaccgagacccatgttgggcagcgcgcaaaagagcacgttggacgcatagactgcaaagagcgtgaggcccgccaatcgcttgtccacgtagtgctngtagaaataggcatggttgatggccaggtagcgctcgacactcatggcgcagatgatgctgaggccggacagcgtgaagaagagcagaatgaaggtgctgtactcgcacacggctggcccccgggcattggcgtatcatgtacgtggcgatggtcacgggctcaccacaagtgcccacaggtcggtgcagcagc

SEQ ID NO: 473 - DNA, 380 bp, Homo sapiens
tttttttttttttttttttttttttttttttttaacttcctgaaaactctttataataatgcaggacaactgtatatagcaaacgccttcaaaatttaaactctttaaacatttaattcttcagcattaatacacacaaatgcggtaacaggggtcaggggggtggtgcgggggcaggtgggttacagcctccactgggatcagggtttcaacagtgttacttataaattatattacatcaattttatttactgatctaggcagccagagggtggaaggatatacaatgtggaggaaacacattcataccggggtgaggagtgctggcgggagacacggctctttaacatgaaaaatgtataaagtatttagcaaaagtt

SEQ ID NO: 474 - DNA, 288 bp, Homo sapiens
tttgacatctctatatttttattgaaaataaaaaagtcatggtgctttcttcctcataagtggcatatggacacccccagtgctgccggtctcgcttccggtacaaaagtctcagcaggaaaccaaccttaatggcttgttggtggataagacggcatcaacttgtacatttgcccattgagagaactcccaggagcaactgtcctctctccagtacacgcggcacgttgctaagaaggcagatttcaggatattcacattcatgcattacgtatctcacactacctg

SEQ ID NO: 475 - DNA, 566 bp, Homo sapiens
ttttgaagcctcagtcataaatttaatcaattctaggttgaatgctaagaaaagttttaaatgtggaaatgtggtacataacatttcaaatataagtggaaggatcatcagtagtgttatcaaaatgcataatacagaaactttttaagaaaggataaaaaattacactcaggacccataactcttcctcattataagcatatgtagtgattcattcatgcaggtttttatatgtagataggatttttttttccttttcaagaattccattgtagccatgagatgaaaaatgtattatggtaatggtatagctttcttctattttgcttttagtgttaggtttgctaaaagcttatttaaaattcccaactgacataatgtgttttcaataagggggacgctgccgtgtccaatacccttcccctgtcattgttcggtaccatatctcctggcttccttctacatgggtcacttagttaagagggaggccaagggagttccgatttcaggcagtgtgtggcagggttactgtcctagcaacctggctactcctcactgtgaacgtt

SEQ ID NO: 476 - DNA, 202 bp, Homo sapiens
tttttttttttcatatagtctagtctttattgaaagacttacttcaactgttgtttacagctttggcttaagttggccattttagcctctcactgccagcagacataaaaatcaagtgggaatggcacgggggttgggagtgaaaatactagtagagaaattatgagaacaaagaatatggcagtcagtcagaaacacatca

SEQ ID NO: 477 - DNA, 423 bp, Homo sapiens
aggattccatatttcatttccattttattacatgttcacattatttcctgaaatcatcttagaaccttttgtttttscaaaattttagaggtccaggccctgtgatagctatgtgatgtttttyccagcacataaagcaaattcatgatgtgaaagaggcaaatsacaatagttaaagtatgtcttattttgtaataggattyycytaataaaamattattgtggaacaaggtacattaaatttsgcttgcaattaggaaatatgggagcsggacttgaagagcgtgtgattgagtccccacatctaactgatgaggaaacaggctcagatgggtctattgatgggtcacttgctagamgcaaaactggamctwgraaccacgscctggcttctaggcagcaagcaatagttttctcgtgccb

SEQ ID NO: 478 - DNA, 315 bp, Homo sapiens
ggagacagggtctcgctctgttgcccaggctggagtgcagtggtgcaatctgagctgactgcagcctcaacctcctggactcaagcaatcctcccaccacagcctcccgagtagctgggaccacaggtgcgcaccaccacacctagctaatttgtaaaaaatttgtagtgatggggtcttgctatatagcccaggctggtcccaaactcctgcctcagccattttttgtttttaatataagcaaattatctcctccatccctccctggggcaggagacagctaaggtggggaaggctccccagagggttgcagag

SEQ ID NO: 479 - DNA, 346 bp, Homo sapiens
catctttaatgcagaggaggagatgggatgtcactcgctgtctggaggcacgtgggtggtgtgcgggccctcactggccagcctctgggtggccccgcctatcccagtatgaacgtagccaactcaagccctctactgtgtctcctcgaggctgatactcacagcccacgaagcctttgtagccttcatcttccagcagttgaaacagataggggaaattcagctctccggggctgctgggctcccctcggcctgggacctgtgccacctgcacatgcccaacaatgggcaggaactcccggatgtttcctgtcaggttcccatccatgatctgccagtgggaata

SEQ ID NO: 480 - DNA, 354 bp, Homo sapiens
  misc_feature: n=a,t,g or c
taaaagtaaactgtttattaaaagatacagcaaaggtacagatacagagatacatacaaagatacagatatatatatatatnnncatatatatacagtcttgctgttttcatgtgcactatatttagcagcacattatttaatcaggcggcattttaatggggttgttttgacacttgggcattattaagatacaactatagccccgtgggaaatttcaacgtttgaattccacttctccgacttttaatagtaggcaaagaggggaaggagaagggaatgggagtaccaagggctgagcattagggttaaacacaaggantttaaaaggggccaaggntaggcaaaggggaag

SEQ ID NO: 481 - DNA, 387 bp, Homo sapiens
  misc_feature: n=a,t,g or c
tttatttgttctataatttaatagtatacctataaaataattacattatacttatagctttncttcatttataaacaaaacaaaaaaattaaatacaatttgagccattataaggtaaactttgtacatacgataaccccaganggagcttcacactgcaggcatatcatattgctttcattgctacacccacaattgggttcgaagagagtgtgctcgtgtttgcattctgtaagtncttnggcttaatccctcccctatctgtgtggggttccatgttaataaaatgatagggggttgggctttgcaggctgggtcagggggcttctcctccacttcacctcccaatccacccctaggcctccatttacaatcacgnaaatttcc

SEQ ID NO: 482 - DNA, 428 bp, Homo sapiens
  misc_feature: n=a,t,g or c
aanttacnttttagccaacttttatttttatgcctagaaaaatacatgggacgtttaggactaatgtgctgggcaatttgctacttagtgatagtaacacaatcctgaaaaggcaagcacaattattctgtactttttaaaagttttattcagcaataagaccataatttttcatatttaaggagtatgaaaaatttgtggagttttaaaagctgaatacatgtagcgttggatcaaggcacatacaagactggccaaagggcggtacaatgcactttggttttttgttgaaaaaaaaaaatcatgggcaacagaaaagtgatatggtttttcaacaagtaacagctcacaattcagtaggaagctagaaggaaatgttacattacgagttcnttatataatatccgggaaatttgtgacagtaatgt

SEQ ID NO: 483 - DNA, 390 bp, Homo sapiens
  misc_feature: n=a,t,g or c
actggcttttggttaattgacctagagcccagttctgcttaagcctgacttttctaaagggataattagccaaaatttcatctggagctggctagagcccagccatgctaagcttacaaagaaaatggttctctcatctggcccccattacactgtctcaaataaaatcctcattggtaccacaaatcaaaaacaaaaccccaaaattaaaaagaaatcccactttcctagactaccaccagagacaattcaaaccaactcatcacttaataagcaggattatccntagtgatctctatgagcattggattgggaagacagaaatcagtgcgacagggcaagagnccacatntggggaacggcaagcagtaagggcttgaaaacacagcc

SEQ ID NO: 484 - DNA, 451 bp, Homo sapiens
  misc_feature: n=a,t,g or c
gtgtctcaaatagctttattgttcctttgtggatctgtcggcatctgtatggctaccttcagggtgcagaggttttaagctgactctgaaatggaggacattcagttactattgcaagaagttcaagaaaaatttaaaaagctccaacttctgtcccccagggtcggtaaggtttattgtttgttccactgctggtctgctgaggactggacgtggctgatactgacaagggcgggctgatggctgtggcgcggcactgctgctgctgcgtttgggggaagcatggggaatgcccccgcgaaggacagagggaagctgtgtgcagccgcggtggctgttgcggctgcggcgttggacggtggcagagagggacaagagagaggtggagagaagtggcacgcagggggcgacgctgcccgtggaatggcnattcggagggctgaatccgcat

SEQ ID NO: 485 - DNA, 446 bp, Homo sapiens
gatatgacaatcctttattcactcggcacatttggtttctttgcattttcttccattttacattgcaggtgtggctaccaagagctggataacgagtccctcaaacaaagtttggaattgcgagatatattggggtaccttgattcttgagacagttgaattcttctagttgatcttgttgtattaaaaagtcactctcaactgaagtgaccactgcatttcttttgtaaaaaggtcatttgactggcttttcctcacaactgccacccatgcagtacaaaagcaggaaatcccttttcatgaaaggtgtaagtacaagatgacatttcacatttttttaaaaaaagaatccttcatgggaatatatcctaataatcaattatatggagacagttttatgtacaccaaatttctgcaactttataataatggaaaattagaaacac

SEQ ID NO: 486 - DNA, 501 bp, Homo sapiens
  misc_feature: n=a,t,g or c
tttttttttttatcaaatctttattctaatgaaatttaaaggancctctggtacgggntcccttgnccgggtatcgcggctccagggagtaggtatgggaaggagaggcccagagcctctctgcattctccacactgatccaacacgtcatcataaggaaaagcactccagcaggagaggtgtgcatgggaagaactgggttggccctgacacaagcgtgacccccatggcatcacagttgcctcagccaagagacaagagacaatgacacccagctggacaggccaccagatgtgatgacacagccgaagcgctggtcccacgccagccagaaaccaccagctgctcgtcccatgtgaaaaggcagcntgtcccaagccctcattaagaaaggagattaaggnagcaattcccgtgattccacgacacacgtgacattctcggagagagacacaggcttactgtgaaagttcagagnacggtgcggtccctaagntgggt

SEQ ID NO: 487 - DNA, 401 bp, Homo sapiens
  misc_feature: n=a,t,g or c
agtacagacttacttttttattttaaaatttttgctataacatttctggagccaaagnagaagggtatccattaacttcattgttgccttaattnangggtgggtggcaatgcaagggtgggaacacaaggaagaaagaaatattaatgtcagctaagaaatcatgttatcaggctatactgtagttggttgcttctgtgttactggacatgacaaatgatctggtaaatgatgttaaattggcttgaaacaagagagtctcccaattcttagccacggtttcagtcagccctggatgaaagatggaaaaatttgacatatatctcataaagggaatttgttgcttccatggagattataagatggaggttactgaggaattaggtagctgggtggcttac

SEQ ID NO: 488 - DNA, 511 bp, Homo sapiens
  misc_feature: n=a,t,g or c
tacacacactgtttgaaggtactttattaagatcaaagatttttcattacatttatttataaatccttcctagtcaaaataaaataataaaaatctgtatctttagaaagaacatagttttgtaagtctgagaaggttatgtttgtcagtttcaaattattacagtttagatacattcaatcattacacaataccaggaaggtcagccttaaagataccaagaacttccatattggtcagtaaaataagggtaaaaaattaaattttactttcacctttttatgtttgattgactacagtcaataatagggagtaccagaatttacctttttgggtcttgattttttaaatatatggaatttttaaaaagtgaacggtncctccttcctccttaccataagtgggctccaaccttangggaagctgggcttcctggaagggaaggaagtgcnaattccnccctggcngggagaaaggaggccggggggaagaaaggtnccgaattccgggg

SEQ ID NO: 489 - DNA, 452 bp, Homo sapiens
gatcattccatcatgtattgatgcatacaaatatcacattgtaccatataaattatacaattattgtacaaatatatacatcaatatacaattgtacatacaatacatacaattgttgtacaaatatatacaattattacttgtcaattaaaaattttaaaaaagaaatctgaaataacagttgccccctatgagcatctcacgataaatccctttaatctcctctacatatactgagtattaaaaaacagaatcgtctagaacattgttgctgttctgagacctgtctttctcatttaacacaagtgaacatttttctttgtcagcaagtagcggtaaacatcatccattctaatggctgtattttttaataggtggagttgtatcttcagggcagattcctaacagtggaatggctgggtcacaagggaaatgtgtaggtagtttttgga

SEQ ID NO: 490 - DNA, 364 bp, Homo sapiens
  misc_feature: n=a,t,g or c
gttttaaaacatttctttattagtatatagacagtaaagcatgaaatagatacaaacattacttataaaaatgttttgaaagaacatttgaaaaatagatgaatgtcttctagccagttaatagcagagaaagaatttagttttggtagctcataagtcagtaaccgtatgccatgtctccagaagtaaaatccgtctgttttccagaaaaatgtgatgtagngaattntcattttatgtgttattttgcactcattaatgtaaattttagatttaaaaaaatcaagtttatttgctttctaagaaaatggnctccttncccattcgccagtagnttaatatatgttctacggtgtgggtgtgt

SEQ ID NO: 491 - DNA, 351 bp, Homo sapiens
aagttctcttaagtcaagtaaaacagaaatggcactttctttttagggttctcccacacagctgcactgtcttccttagccagcagaggacacccttcagcttacaaagactcaccgctttcttctggatgaaaatttgtgcatccttcaggtggccggcaatgttctcacacagacgtttcctctgttcctcattcagcacgttcacatagaatgcccgcacctgagtaacgttatcatcattggcaagtgttgaatctccgcacttctccaagaatattggatgctgtgctccaaggcagaaggctgtttgttccggagcaccaaagctgttggggtagtaatttggag

SEQ ID NO: 492 - DNA, 373 bp, Homo sapiens
  misc_feature: n=a,t,g or c
tttttttttttttttttagatctctctatttatatatatatatatatataaaaggttctttagcagttaaatagattccaatatgaacgtctcccaggacaaagctgcgtctcgcctctgggtcacacgcatctgtgcggctggggtgtatgtgccgcgtcacagcagctctntnnaaatacgntgattngaacgcagttccctgtggtggtaaaaacacattcctgacaagtgacaagcatgaanagtccggcagctgcagcgcctcactcggctgggacctcgtacttgaagatgacgctgaagagccggccgcccagccgctcggcagccacgcgngtcttgattactggccagctttgaggtntcgcag

SEQ ID NO: 493 - DNA, 650 bp, Homo sapiens
  misc_feature: n=a,t,g or c
tttttttttttcctttaaatccctaatgttcacaagtcatcatgtggaactaaaatcacacacaaaggcaaatcatgaggaaacgttaaatatttcaaaatgcccacgaggcgtgccagaaacagtgctgtatctatagcacagaatcgttggaggccaaagctaaagcagtaggggctactgcaacttctagctctttactgctgcttttttgtttgtttgatagagggggattcaggtgagggggttcggtctctcaggaagttaggccataatttctgcaggttcagtgattaacttggatccatcccatgctgtcttgaactgttcaggaatgggaaattctctataatcaccatcctgagggataagtatgttcatttcagatgacttggcgctcacgatctcacagtctaatgcatcttcactgaggtatatgtggcaaccttctgtcttattaatggaaattgttggcactctccccattacctggatttgaatgtcctgggagttgatcacttccacnatgcccaccacattggcnaacaccagccgagtttttacagtggccattatcctcgtgccgaatttggcccgaggccaattcctatngggcggattaatcgaaccagcaactgttccggngaatg

SEQ ID NO: 494 - DNA, 588 bp, Homo sapiens
  misc_feature: n=a,t,g or c
tttttttttttttttttttttttttcttagagcaaacaaaaaattttattagattatatacctgagcaatagaaaacttcgagataacattttaaaaatattgacacgttaaggagtattttactttcaaaataccataaaattgattttaaattccctttggaagaaaacatcccctagtctccttcactaaattacaaataattacccaaatataaaaaggacttgcaatgtttgttaaatatggacggcatgaagacaattaagaaactataggacttatttccaacaagaatacaatatgcatgaagttttgaaaatgtgactttttaccacagtttctgagagtgtaatagtactaaatgttctaaatgtaatctttcagatccacgagcggtgaaagtaatgctggtttggaaaatgaggttgatactccccgttaagcttctcagtgaatgggctgcttctgtttctaagctgcaggaacaaagcacctctatctataagcncataaacacacaactcaactatccagatactccggggccacaatctcaatctagggccgtaaaaattcaccaattgatg

SEQ ID NO: 495 - DNA, 378 bp, Homo sapiens
aaattaaattattgaagcagatcagttttcgaaatattttagtggaaccatttctaggacaatgggcataaagctatggttagatccacaaatttcagagcattggccatagaataaccctggtcggtttgatgttactgttgcttgatttagtcggcctgggatggcatcagttttaagtcctagggaggggactgctcatgagtggaggacgtcttcagatgaaattaatatacggattggaagttctattggcagaacgactcggttatcaacttctagcagtcgtagttcaccaggttttaggtcgtttgttgggattatatatgaatcaaagcataggtcttcatagtcagtatattcgtagctcagtatcat

SEQ ID NO: 496 - DNA, 437 bp, Homo sapiens
  misc_feature: n=a,t,g or c
gaggacagacgtgaaaactgtttattcatacagaggaggttccaagccacgagggcnccgtcgaaaagcacatcacctctgtaacaacacacgagacacggccatggcttcacagctgcagcaaatcccaattcgccccacgacacattcgtctgccctctgaccatcattcaatgtccctccaacttcattcaagtcttctccttaaaactgtttcctaatcttcatgctatgaatggtattttcttaacacataattttgtagataaagaaaaacaattaaagtgtcattagttggtgcttttttatatgagtgaaagacctgacattattttcccctcaagccagaaaaataatagggaggagaaagcatgaagacgtctcatccttaaccccaaaccattcacaccccaggtcacacaggccggctgggtcct

SEQ ID NO: 497 - DNA, 378 bp, Homo sapiens
  misc_feature: n=a,t,g or c
ttttttttttatgcttgaactaatttattgatgagattctcatttctgtagtataaaaggaaaatattttgcagttatctcgtatttgaaagactttgccatagagaactttatcagaaatggatgaacttttcattatttcttataagcatattggttttggcctgcttgagtttaaaactttttttggtagacntagaatgttaatatttagataaagaaaatattttacngaagacattaccagaaagtaaaataacttgaacatttcngtattagcncnttatcagagaataacatttattttatttggaaagttttccnaaatatgagacnatcngcnatttctcagacnaagtgaaaaatttaataaaatag

SEQ ID NO: 498 - DNA, 462 bp, Homo sapiens
atttttctactttcttttaatatcattttttaaagttggtaagcagctagacatcatttagaagcagacgggttaaaatagacaagaaatagcaaagacacatccttcacatcgtacagaactgtattagtatccaccaccaccatcacaggggagggctagctgtcactggggtcaggagtactctccattattgtgcaggggaccagacagcatttaggtgtgacgatgtcaaactgagtggacatagagagtgccgggatcaaggtctacagttttggctctagacttgcgtgagggttggttactcttaatctcttccaggctgtgctggatcccatagccgaagtagatagcaaagccaatcagcatccagaccccaaatcgggcccaggtaccagctgtcatctgcatcataaggtaaatattcacagagatgctcattagtgggaggagaggcaa

SEQ ID NO: 499 - DNA, 379 bp, Homo sapiens
attgcattaaaaaactttatttcttttaaaaggtccaatataagccaaattaaccccaaaatttacagctacacttagagatctcctgaactaaatggcattgtttgagatgagtgtcttgttaaaggaggtcatttgctattaccaccatttcacccaaagtagttctagagcagaagctggtattataatacacatcagatatttcagatgtcatcttttatgtataagttaaataaagcaaacaggcttttctactctgtgtgaggataagaaacactacagaacagggcctgaatgctttagacatacaaggtgtaaccataaaggaaatttctacggtgctgtgttcattcattcaagtaattaatgtacttat

SEQ ID NO: 500 - DNA, 65 bp, Homo sapiens
gttagtgagatagtttatttagggacaaaatacattaagatgttttactccactagagcaatctt

SEQ ID NO: 501 - DNA, 314 bp, Homo sapiens
tgtaatcatcattcacgctgttgatgatggcttcccaccgcagactgctacagggaccctaatgctcttcctgtctgacatcaatgacaacgtcccgactctccggccacgttcccgctacatggaggtctgtgagtctgctgtgcatgagcccctccacatcgaggcagaggatccggacctggagccgttctctgacccatttacatttgaattggacaatacctggggaaatgcggaggacacatggaagttggggagaaattggggtcaatcagttgaacttttaaccttgagaagcctgccacgtggta

SEQ ID NO: 502 - DNA, 335 bp, Homo sapiens
acaagcagagtctcactttgttacccaggctggattgcaatgactcaatcatagctcactgtaaccttgaactcctggcctcaagtgatccacccacctggcctcctcaagggttggaattacaggcatgagccactgcactcagctcatcatcacttttttagagaagtagcataatatggtaaaagaacttgagctttgtaattggacagagcctggttcaaattttacctctgctatttatcagttgtacaaccatcaccttctaagcccctgttacttaatctgtaagatggaaaagtcatcttcctcctaaggatgttctgagaattaaa

SEQ ID NO: 503 - DNA, 233 bp, Homo sapiens
  misc_feature: n=a,t,g or c
ccacttactaaagtttattaagtacaaagaaatgaatctncggaaggagacatcaataaatataaaatacacgtgaaacattggaggngtcacagactgcagtgtcagtgagaatatgtgacaatggcggggactgtgtgactcagatgtctctaagtctgagtttacagtcaaggggttaaacctttacagcgcccaagggactcagtgcaccagcatgagctcgaagggtt

SEQ ID NO: 504 - DNA, 371 bp, Homo sapiens
  misc_feature: n=a,t,g or c
aagtaaaatttaataccnactcaaaatttncaatgaaaattttaagtattgagaagaaaataaaaataactttgaatcccaaatttaccttttgatattttttctatgcatatagacaatgttgagtctcagtgagaaagagctgtatgtaaaaccttcaaagaatgttttactacgnaacacgncaagacataaacagcactgtcaatcatgaaacaaantcagggngaaaaatctttccttctctcctccctgtctccctcccttccttctttctctttccagattttgcatctcaaggattctaaangnaccctgggtcaatatccagttaaaaatcagcagtgtcaggcacagtagcctaattatac

SEQ ID NO: 505 - DNA, 284 bp, Homo sapiens
gtagagatggggttttgccatgttgcccaggctggtctcaaactcctgggctcaagcgatccatcagctttggcttcccaaagtgctaggattacaggcatgagccaccacacctagcttgtttattcttttaaaactgcctattttgccatgaaataggtacccttgctgtgaaagcctgtgaacacccctggatgtgtgtaccttcatttaaaaactgccttagagggcatgaaatgtcatcagggaagatctattccgagctgggtgtgagctctagccct

SEQ ID NO: 506 - DNA, 254 bp, Homo sapiens
ttttttgttgttgcagttgaaagataagccatttattgaccatccacttttcaaataaaacacaaatgtgagcataacataaacacacccaagactcactagcccctgcaagacaggaagcattcttggacagagagtctgcaaatgagtttccttatacctaatgtctgaacttctcactcattctagggtttcatgctttgttatctcttacaaaggaaaggaaactggctagaagattcatgtacaagaag

SEQ ID NO: 507 - DNA, 356 bp, Homo sapiens
ttttccaattacaaatttattaacccctaaaataatgttatagattcagagaaaattagaagcatagaaaaaaaaaagcaagattgtggtgacatatatgtaattaactgaacaagcaggaagaattcaaaagcatttgaattgagatcctagaattcatagctggtctccctgcccaccaagaaggcatgttaatctggattctttagagataatagaaatgtcttaaattcctttgggtgcagtaaaatggccctagcttgcactagccccattgaaaggtagagattaaattgaagataaccaagcacctgtcattcttcccactgccttctggatcactacaaagaaataag

SEQ ID NO: 508 - DNA, 523 bp, Homo sapiens
tttctatatgctaatcttctctatatcattttaattttagtatatgtgctgctgaagtgagcacattttacggagttttaagctaaagtttcttttctcacacattgtcatataaaaggggtatttctgctttgtcccctccctgccatcataccaaaaaataaataagtacataaatacaaattagaaaagcttaaataagaccggtttttaaaacccaataaagcaagatgagacagaactaggcccgaagactgtggagaagattctaaaatggagagggggaaaaaaaaaccagaaaaaaacgggtttccaaaaacactgaaacccatggtatgtgataactttctaaccatctggactttggtaggagtgtcacgttttccaaagctgacttctggaaatcttaacctggattcagaaaaattccagcaaagtgagccaacagccaggaagcggttattttgcaagagatagggggtaattccatttacaaacatatataaatagaaataaaggccac

SEQ ID NO: 509 - DNA, 374 bp, Homo sapiens
tttttttttttttttttaatatctcaaaaaggaagccacttgcttgatatcaaaagtgctgtggaaagaaaggaggggaaaaaaacccacaaataaatgtagaatctagtttattttaccaaactgtatatttttccacttaacatttctacattagcaatgatgtaactctccaacatttccttataaaaaaggcaaacaagaagtgacaactcatgctccaaatattaaaaaatatatttaaacatatgatcaagaagatttgggccgtgagtggtagctcacatctgtaaccccaggattttgggaggctgaggtgagtggatcacgaggtcaggagatcgagaccatcctggctaacatggtgaaacccc

SEQ ID NO: 510 - DNA, 549 bp, Homo sapiens
ttttttgagacagagtcttactctgttgcccaggctggagtgcagtggcgtaatcttggcccactgcaacgtctgccttccgggttcaagtgattctcctgcctcagcctcccgagtagctgggactacaggcacccgccaccacaccctgcttttttgtatttttagtagagacggggtctcaccatgttggccaggataatctccatctcttgacctcgtgatccacctcctcggcctcccaaagttctgggattacaggcgtgacgactgcacccagcccaccacattttctttatccagtctatcattgatgggcatttgggttgattccaggtctttgctattgtgaatagaaaagcacagatttattgaagacaattcagagtgggagcgggatcgagccagcagctcaagagcctccccaattaaggtttgtaataagctagaaggaacccggcaacacccctagacgcccttcagaggcttccaattggttagatgctatgaaggattggctcaggaccaatcagtggccgtagtggagac

SEQ ID NO: 511 - DNA, 284 bp, Homo sapiens
ttttttttttttttttttttttttttttttaaaaactggctttaatggacattaacaaataatatacactgatttatcacctttaagcaacaaaaacatgacttgtaattattcaaataaggtaggatttttctcttaagtacacttcttaaaagtcattcacaagacaactgggcatccactaagaccaaggcactgtgagggaggcaaacagcacaacatcctcacctcaaggagctcagcctgggatgaagacagacacacacaactccagcatgaggcca

SEQ ID NO: 512 - DNA, 419 bp, Homo sapiens
tgacatttaaaaatatttattgacttctgtttgctactttcctgattgcatttaaggttaaatgacactagctaggaagctacagtttcctggaatctttcaggtaattaagcctaagcctgggtaatgggagggcacaggctaagactgacgagagaagaagacactagagagagcaacaaacaaaatgatcttgaaaaacatgctttttgagagcactggaatgatttaggggtgggtacagtgggagagtgaggtgggagaagaagagtgtctggtaggtgtgctcactgtcttcttggctgagaatgtttaattggaatagtgggcgctcagagctcctacaaaggcagagcaaagcttcttagctgacattgtttgagaaattgctggcaggctctggaatgcttgtttggctt

SEQ ID NO: 513 - DNA, 325 bp, Homo sapiens
ttttttttttatccctggctgtgtggaaacagcgttttattaaatgcttcacacagatttggtataataaagatgaatatattatatcctttgcctcccccagagtgaaacaataataagggaggaggaaaaaaaaactataaaatgaaacataaatacaacgtaatgggacttggggagagggacccgtggcctgtccgggccgccacaggcaccccaccgctggcactggggacggggtcaccgggagccggactccagtccctccttgcccagccagagggtcccaggccctggcttccactctgctgccctgtgatgctgg

SEQ ID NO: 514 - DNA, 323 bp, Homo sapiens
ttattttttttttttttttttttgccatatttttaaaatactttattttttacataatactgtcattacaaaaaaatacaaaaaaactactataaaaacattcgggggttgtcaaagtgagaaaacctaaagaccccaccccaggatctggctgaagcagtcttcccccagcttcttcactatgacctttatacaactatgggggtggggtgggatcacacaggcataaaagggctggaaattccccacacagcctccaagggtaagaaatgagtagcttcacatatcacaaaagtgggatttggaagtttgggggtggctag

SEQ ID NO: 515 - DNA, 294 bp, Homo sapiens
tttataaagatttaatttatttaaatcacataagattattcaaagccataggcatgattaagtctctatagaatcaagaagattttctgtgtggagaatatctcgtggagatttgaaatgtgtcgcctctcctgagcagccaggattaactctgcttaggacgtttcagataagggtcaggctggcgtccttctttctgcctccatgggttgccaccttttgctatgtcaggggggtcgcttgcttaagacgttgcaaggagcaccccaaatgccaggcttcccaccatagctg

SEQ ID NO: 516 - DNA, 389 bp, Homo sapiens
tttgatttacaatgaagaaatttattagttcacagttctggacgctgggaatttcaatatggaggtgccaacatgtgttgagaggcttcttgccgtcttcttcaaatcatggaaaaggttccccaaattctctctcctttctgaagcgtctcttcgaagataaccctttctaaacatctcccttgagtacacataaaagtttactccaaatttgtgaaatgtactggcctagggagatgctcagtcaatgctgattaattttaggtagaatagaaatgtcaggcacagtgagcacctttgctgtgattgattgggtgtcgattctctgctatgaagcgaaggggtgtgctggatcaaacacatccctctggtgactagctctctgcttt

SEQ ID NO: 517 - DNA, 148 bp, Homo sapiens
tttttttaagggttcaaaggcattctattattatcattgacagtaataacactcaacactcagtaagcttgcactaactatgcaccaggtactgttttaagcccttcagaccacagcagctttgtgttgtattattttccccgctgct

SEQ ID NO: 518 - DNA, 317 bp, Homo sapiens
cagtatatagaaaatttaatatgaaatcacttaaaatatttcaacattaagaagtcttaattcagtgccttggcatgagacatttaaaagcatgtttgggtctaatctcaaattagttcaggggaacagaaatagctgaaaatttatgtatatgtgtatgtatatatatatatacacacacatctgtatatacatacatgtatatattcaaattatatacatataaagatatttgtagattcaagatatatagggattatatatctatatatattatatgtgtgtctatttatacagatatatatatatatatattc

SEQ ID NO: 519 - DNA, 348 bp, Homo sapiens
tttttttttttttaggagtaccagatgagatagaacatttattttaaaagcacttaagaatttacagtcatattataagaaactagctttgctaatgaatgcataaattctttgtgtctgattttttgataaaacacagtgaatatgacttagagaaaatagcagccacagatacagctaaaatgtgaatgaagctggaggcagctgaggaccacacaccatgaaatgtaaacagaggagaaaaaagctagatgccagacaggaagagaagaaccaggagagcagtctttacaaatagaggtaaatgtaactatgtctgaaagaagaaatctgataggtcttaaagaa

SEQ ID NO: 520 - DNA, 194 bp, Homo sapiens
atatttaaaaattaatttaatgcttggctaaatcttaattacatatataattatcaaacgatagtccttaatttccaaaaaaattcctcttttgaaaatcacagaatcagaaagcataaacttttaaaccaagttcccctgaatattttaccaatggtgggtattaaccatttataggaagaaccatggaatat

SEQ ID NO: 521 - DNA, 495 bp, Homo sapiens
tttttgtttttttttttttaactttagaaagcgaattttattagcttcatgagaaacagctgccatgagtcaagacctggatggggatagagctctggtagcttccaaccaatggcgtgaatacagcccacctgttctctctacatccgcagatcagggtcttagtgggggtcccaagaagaacaccccacttccttgccctctcagtgcaggcacagattcagggaatgcattcttgttggaccttaggatctccgtctctatgatatctcactgaacaggaaaatgaatcaaatccacattctagacagccagatgctgacagatttgggatacgagccactgttctggatcatcagccaggaacacaacactttgaatcaccaatcagaaagtcaagattctggaatggcaaataagaaccccctaactttctagcagatttcatcagtagctccacatcctagaatgactgtgttacaaatcaaccagaaa

SEQ ID NO: 522 - DNA, 202 bp, Homo sapiens
agtttaatcataacacagaaaagcttttattatcatagcaaaatcacttgattcctcatcctttagcaagaagagctggtaagttacaatgttctttggatgggtgagagcactgaatatctgagtttactttcacaaattataacttcaaactaacctttcgaaatcttctgccagctgtaatgccacattaaaagatttc

SEQ ID NO: 523 - DNA, 387 bp, Homo sapiens
ttttttcaggttttcttgtgtttaatttgaaacgtccagtaacattaaagaacagcatttgatttgcttaaacaaagtagtaacagctgaagttccttccaaatcacttttctgattctctaagaggcttgcctatgccttgcagatctagcttcacctacaagacatattctgtaaggatccaggttcagcaaggtgtcagaatgtcctaagggtttctgtcccggcgctctgcctgtcccgcttgtgcacaatgcttttgcctatccctgtttctgcatagattttagtcttcccaccagggacgcaactgtcagtttcctccgtctctctcggttctattccaatctgctcatctcccctcccgtccccgctttccccaaggac

SEQ ID NO: 524 - DNA, 335 bp, Homo sapiens
tttttttttttattcaatcaatttttattgagcacatcctacgcacaagacacaatattaggtacagaaaagctataaagataaatgtgacacattctttaccattaataataatatatattatctaaaatttaatttgagctaatatataactgacaatgaaatatttggaccacctaaaacaaggataaattattctgtgacaagtttatattcttgcattatgcaaaaatgattctaaaataaactatttttttcccagaaattgtatgagctatacattgctatgtaacaaattgccccaaatttagcggcgtactacaacaaacacttct

SEQ ID NO: 525 - DNA, 465 bp, Homo sapiens
tgttggccaggctggtttcgaactcctgacctcgagtgatctgcctgcctcagcctcccaaagtgttgggattacaggtgtgagtcaccgtgcccggccagcaatcagttctctttgtcaactttatttagttgcctgtgggaccctgacattctgtatctgtgctcctatggcctctggagatgtgtgtgaaaattgtctcctcggcccttagcctacttcacctcttgtgctcacaaaaaggggacagagaggagggagaggaatccagcaagatgaagccagcctgagagagcataaaaaccagtcattggtattgtggtcttgcccaaatctttccctcgtgtgaaggaagcctttgacagtgaagtttagaattaaatacagggccagctgaagcatggtgaagccctccaactgcctttgccttgcagagcagtccatcatcagcgagtatgagaagag

SEQ ID NO: 526 - DNA, 375 bp, Homo sapiens
tttttttttttttttttttttcatggtagcattatttatcatagacaaaaatgaacagaacctagatgtccatcagctgatgaatggataaagaaacatggcatatcatacaatggagtaatttcggccataaaaagaaatgaagtagtactgatacatgctatatcatgaatgaaccttgaaaacatgctaatagaaggaagaaggcagagagggccacatattgtatgattccatttacataaaattcccaaatccatagagacagaaaacagattagtgtttaccgcaggcttgggaaagcagaggtgggaactgactgctcatgggtatggggttcttttggggatgatgaaatagcctgaaattaaatag

SEQ ID NO: 527 - DNA, 416 bp, Homo sapiens
tttataagattattagtataaaaggggagataggtaggagtagcgtggtaagggcgatgagtgtggggaggagggtgggagatgaggaaaggttggttaatgagtacaaacctatagttagatagaagggaaaagttctatgttcaatagcagagtaggatgactatcattaacaacaatgtattatatcaaaatagctggaagagaggacttgaaatgttcccaacacatagaaatgacaatacttaaagtgatgagtcctaaataccccgacatgatcattatacactctaggcttataagaaaataacatgtatactccataaatatatgcaaatatgtaccaataaagacataacaattaaataaaaagaaaaaatttcacagaacatattttgataaatacattaaaaact

SEQ ID NO: 528 - DNA, 398 bp, Homo sapiens
aattaagaaatcagatttaatcataaacttgtgaaaggaacaaattcaatttttaataacttttatatcaatggaagaagcattttcaattggcaaaactagaggtttctccctaattttctgtctgaatttttataaataaaatgcattatttagctgaaattttaaaaatatttttttcactagacgttagagcaatcttagattttaaataaattgttaagtatcatgaacatgttatttaagatttaaaataaagctaagatttgctttacattgtggcaaatatatacattttagaaaacaaactttgtatttagtcaacataatttttaaaataactaggttgtggatacacataattttctgcagtaattgacgacagatgaaactacatt

SEQ ID NO: 529 - DNA, 440 bp, Homo sapiens
  misc_feature: n=a,t,g or c
gatcccaaactgttccctttttcatttcttgaaatgttaccactacagacattttttnaaggtgaataaacagttgtnatgtgctgtacctaaaatcatgtttaatcgtataaggaaacatttcaatacacttatacaggaagaaaactatagatgaagtacatgtgtgtgattcagtctgattcacagaattctgagagtaatatggaataaaacaactccacttagatgataactgaagcatttcctgccttgtgaaaatttggnttttaaattgctgttagaatgggnaatttggacactttatatcattgtatanttncagactttagnttctgtatctnttgggaaccatggttatagcaaaaccnttggnaataatcctgtttccnanaccnccctnnatgtaaacctggtatgcttggctggtaacncctaag

SEQ ID NO: 530 - DNA, 260 bp, Homo sapiens
  misc_feature: n=a,t,g or c
aaaaaggaatataactgcatttnctttttccaatatgttacagaaaaacattgccctttgactgtcccgttatatattgcagatctcagctactacaaaagatttagttctccatgtgcctcctcaatgctcaaggaggatcacacctgtgtgggtaaattcatggaatactgtgaaacagccaggctccgtaaggaaagtgtgttacaacaggaagtcagtgngcaagggtagtcctccgctagccacgtcacctaatg

SEQ ID NO: 531 - DNA, 592 bp, Homo sapiens
  misc_feature: n=a,t,g or c
ctttcaagatgagctgtatttattactggaacggaagttgtcatatccgtgatcattagctttgaactttaagcacgactgcttttcctccaaggactgtttttcttcaaatgactggcaccagcagcataagcatgacttaaagcagtttttgaatcttttgctcaccaaatacagagcaattgggttaatgcaggaattcagtgaagccatgttgataccaatatagtccaataccaacagaaagctcaaaagttcacatctattgggatcattctgattataaagagtgagcttcagaatcctgctgaggtgaaggggaagccagcagagggcaaagaccaggaccaggcaaaagaccggnttttgggccacttnccggctctggctttagggtggtccatttaaagcaatctgcatgccacttttccttctcaacatttcacaggtcnttagtgtataaaaaatgcngtgatggccatgnaaagccggaattgnactggacagccaccatcttttgccggcctggnaactggctgnaagctgtcttctgaacnggatgagccagccagttccccgatacttccnttgt

SEQ ID NO: 532 - DNA, 430 bp, Homo sapiens
attaaaaaggcattttattataaatacattttagttgtagcagtaaaatacattttgttaccatgaatctttgaaaacaaaagaacttcactgagacaatgagcacactgtaggaactgtagaccccaagttgaaaacttgttctatggaaccaaagtagctaacgtaattccaaaactaagttagaaaagataaagacaaagaaagaagaaaataaaaaccctagagagtggctttggggttattttatggtacaaagtcacttttacttttaaggataaactctttaggtattagagcctcttagatgaggtatcgtttactgcaaagaaaaaaaattgttataattttgccataagttatgcctatttagatggctgtataactggtactttgaagagatgaacctgaccacctcagttttgtacag

SEQ ID NO: 533 - DNA, 363 bp, Homo sapiens
gagtgttaaaataattacacttaatattttaatagtgtgctgtgaaatacatagttttttgttttgttttggcaaatgtttcattttgttttaatgacttcggtccaatataaagaaaatgaaatacagtgaatagttcttctttcaagatgagctgtatttattactggaacggaagttgtcatatccgtgatcattagctttgaactttaagcacgactgcttttcctccaaggactgtttttcttcaaatgactggcaccagcagcataaagcatgacttaaagcagtttttgaaacttttgcccacccaatacagagcaattggggttaatgccgggaattccagtgaaagccaggttg

SEQ ID NO: 534 - DNA, 401 bp, Homo sapiens
  misc_feature: n=a,t,g or c
agccatacacatgcctttatttagatcagcttttttcaaaatgcagccaaacttatgagttggacagcccaaagtaaccagccctattccactgagttagtttaccccacagcagtagaacccagtgctggtttggttcctggcccatggtgggacagcgtgaaggtgatggagggctctagcacaaggaggtgctgagtgccaccgnagtngcttctgcagacagcctagagcaaggtaagcaggagcactcgcttcagaaccgaggcggctcggaccagaggcaggcactttcctccacattggcaaagggacaagggtttgttcttcctacctcatttgctttactaaagggtcaggctnaggcatgaccgatnaaggatgggtagggggtaaaatgg

SEQ ID NO: 535 - DNA, 312 bp, Homo sapiens
  misc_feature: n=a,t,g or c
tatcttttaatacatttatttagcaagagaaaaattatcagaaaatgagaagcaccatttatagttcacaagaaatgcaacatggactccaatagaagtagatatcaataactgatacttcctctgtttatgaccccaaacatgctaaaatgctaaagtaatgcttgcaaagaatatgaatgacaaatgttatccagcagctttttggtttaaaatgattgccaatgactagcagcttcaatgggttaacagtaggganggaanaacccttcagtacctaacaacggctgctgtctggctcccaagtgggct

SEQ ID NO: 536 - DNA, 500 bp, Homo sapiens
  misc_feature: n=a,t,g or c
ctgtctgaatcaactgtacgagttaaacagttttatttcgaaattaaccaacataaacaacaacaacaacaacaacattcactacccattccctcgttaggttggaaaaccagtctgaaaaaataaatacaatctgtgaccatgaaaaggagcaatcacttatttttcccatatgttttgaacattatttttaaaaatagattgggaatctggagggtaaaatgccgggtcccttcccgagcccttagagcccgaacgttgtcgaatcggtcaatgtccaccccgctgctcacctctgtcccagcagcgccggggccagcgcgccctcccgccgcgtctgggagctggcggggaaaagcaggtccccggggggtatcgagtgtccagggatatccacgcagacatccttgtacttgcaaatacaaagaaacacacaggacagagatcaggctcgcgcagggctcgatctcctcggggctcagggttggagggccgtacan

SEQ ID NO: 537 - DNA, 483 bp, Homo sapiens
  misc_feature: n=a,t,g or c
aaaatttttagccaacttttatttttatgcctagaaaaatacatgggacgtttaggactaatgtgctgggcaatttgctacttagtgatagtaacacaatcctgaaaaggcaagcacaattattctgtacnttttnaaaanntttaattcagcattaagaccataattttttcatatttaaggagtatgaaaaatttggtgggagttttaaaagctgaatacatgtagcgttggatcaaggcacatacaagactggccaaangggcgtacaatgcacctttgggtttttttgttgaaaaaaaaaaaaatcctgggcaaccagaaaangtggtaatggggtttttccacnaaggtaaccagctcaccaatttcnagtagggaagcccagaaaggaaattgttacattaccgagttcctttatataatatcngggaaattgtgacngtaatggggcagtattcctgatccttgtaaaagtaaatt

SEQ ID NO: 538 - DNA, 192 bp, Homo sapiens
  misc_feature: n=a,t,g or c
ttttttttttaataactgttcagctacaaaattttattggtatctttttatgttccctctagaggatgtaatgcacaaaagcattgccacggaacatataaaattacaaatgaaatttattgtaaaangtagaatgtcttctagactggngtcagtatttatgtcattcataaaccaaaactgctgtataat

SEQ ID NO: 539 - DNA, 273 bp, Homo sapiens
  misc_feature: n=a,t,g or c
gaaaaaagaaatcacttttattggcttggttttctagcattgctggtgcagtgggggcctgagctggggtgcagtcggcantntcantgggcccgtttgggactgggttgagccatcaggccaccgtgagaaagaagcgactaaaaggcactctgggcccagccaagccctgaaaggccagtggcagganagctgggcgngacaagctcttcccaggngacaagagggacaaaccagggcatctaagctntgctgcctgcgccctnccccgca

SEQ ID NO: 540 - DNA, 374 bp, Homo sapiens
  misc_feature: n=a,t,g or c
atatttttttttttttttttttttttttttagtttttaaattatctttattctttgacancttacagatctctacacagacatctgtgacccttcagacgttcaggatgccccagagaagggaacatagagcttcctgtctgcattacataaacttttcctaataaatgcatatggntaagttataaggaaggtatagttgtagactaaaccaaatatttttgttttatttttttttgagacaaagtcttgctctatggcccgggctagaacacagtgggtatgatctcagcctgagtgacaggggcaagactccatctaaaaaaaaaaaaaanggaancgggggantcaaatccttaagggcaactgggttaa

SEQ ID NO: 541 - DNA, 433 bp, Homo sapiens
  misc_feature: n=a,t,g or c
aaanaggaggaaaaaaaagtagatgactccctcaggttaaagagttgtgctattcaacaaataaacttcctcttccgtttcttctctctcctcatctgtgagattcagttgaacattattgaagcggggtcttggtttgccgtctgggccatatgccggagatatctttttttgttataatgccaaggaggcgcccattgtgagttacaaggcactgcctcagtcccagctttcggaaaatatccaccacgatctccattggggtgtgggtctgtcactgtaaaaggggctcatgtcaaggaatgcttcgaagcttcaatgggccgagggactttctgctggggaagagatggggggtntgctgtgcaaaacacaccccgaggaactgcccacgntaccntcttggtttttcccggggattttctntttgcaa

SEQ ID NO: 542 - DNA, 257 bp, Homo sapiens
  misc_feature: n=a,t,g or c
ccatccaagataactttattccatnttncattatttaataactatttccttcccctccccaccatccaactgcatctcctactctaaaatgcctcttgagcagccaagggtggccagttctgctcctcaattttccagaagaagaatctcagcctgaaagaatatagcgctaggtgacatatgggtggccaaccgtttctcctcaagttccaagagagtgggcatttcgtgaaattccntcagtcatgtttaaagat

SEQ ID NO: 543 - DNA, 219 bp, Homo sapiens
tttctgaaaacaagtttcatttaaataagggtttaattacattacacataacattacccactgagggggaaaaaaaaaccaaaaaccagttggttacttcacatggcattgggcagttgctgctattaagttgaaagctctacagctagcttacatgactgatggatcagttggagattggcccccttgtcaaaagtttaactctgatagaaggttggc

SEQ ID NO: 544 - DNA, 399 bp, Homo sapiens
  misc_feature: n=a,t,g or c
tgtagagactgggtcttgctatactgcttaggctggtctcaaacttctggcctcaagcgatcctcctgctgggattacaggtgtgaaccaccacacttgaccccaaattttgttattttttagagacagtgtctcactgtaacccaggctggagggcagtggctcaatcatagctctctgcagccttgaactcctggnntcaagcagtcctcccacctcaagcctcctgagtagctggcactattggcatgtgcaccacgcgcacctaataatttaaaaaatttttttgtagagatgatggagtcttgtttctctgacttatagatcttttctcaccttgtcacagagttttaaaccaaaccctgtctcagaactgtctctgggaaaaatgtttaggga

SEQ ID NO: 545 - DNA, 407 bp, Homo sapiens
  misc_feature: n=a,t,g or c
gtgcagttgcgatcttggctcattgcagcctacgcctcctgggttcaaacgattctcctgcctcagcctcccaggtagctgggattgcaggcacccgcaccatgcccagccaatttttgtatttttagtagagatgggtttcaccattttggccaggatggtcttgttctcttgaccttgtgatctgccggcctcagcctcccaaagtgttgggattacaggtatgagccactgcgcccggcctcaaacaactaacttttcatttaagtttcagtttcatttatttctgctctgataattattattctgataaatttggggtttgttcttttctcgttctttgaggggatcgttagcttatttgaaatctctactntttttgangtaggcatttattataaacttcc

SEQ ID NO: 546 - DNA, 250 bp, Homo sapiens
tttttttttttttttttgaaaatactctgggccatttttatagaacatccttttggaaaaaaaaaaaaagtacagatcgatttttttaagtccatcccccaggcgccatcatttaattatgagagggacataaattatgcatcgacacattgttgccttttttgtaggatggcacggggggcttcaccgtttcagggatcgcgcctccctccagctcactctgcccctggaggggtccgcggacgccggg

SEQ ID NO: 547 - DNA, 135 bp, Homo sapiens
agtgtatgacgccatttatacgaaacgtccagaataggcaaatccatacctattctgagtggttactggggtgggggagttggatggggacagctaaggagtgtagggtgtcttcttgggctgatgaaaatgtcg

SEQ ID NO: 548 - DNA, 448 bp, Homo sapiens
taagtttttcaaattctagattaaaaacaccatcagtaacaaaattatgaatacttatttacaaataagacattttccattagcatgacacatgacagttttcatgataaaatcagtatagaggagtatgtgcaattttgcataagtaataaaaacattcaaactatcaatgccctgatagcacgaataagttccaccaggcatctcttttgactttacagttttttatttccttttcttcatatatccttgatgttgctgagaagaaactgaactttgcacaacagcagaaaagtctagttagtcgcgggtacaggctctttcttttttttttttttttgagacggagctcaacgctctgtcacccaggctggagtgcagtggctcgatctcggctcactgcaacctcacctcccaggctcaagcgattctcctgcctcgtgccgaa

SEQ ID NO: 549 - DNA, 547 bp, Homo sapiens
  misc_feature: n=a,t,g or c
cggttttatctgttgttatttttttgttgtttaattgaaatggggtctattccacactgcccactgcactgcatgcntattcacaggcttgctcctggctcaccgcagcctctgactcccaggcccaggcaatcctcccgcctcagcctccgagtagctgggactacaggcatgagccaccatacctggcttaaaaaaaattcattacagcactaattcagtggagagaaataaatcaatactcattaaatctaatgagagagtgtctgtgcactatttgtaagtattcttaaatgactaaatgaaaaagatgaaaagtaaatatcccaaacagctaacagtagatgcatatcctctgggtgccgaggtaagagtggatgtatgaatgcacacacacacgcatgcacatacacacgcacacacacacacctttctacaaatgtggcagataaacatggagaccaacactcacatctacagggcatttcactcacccccaaacctctctacgaagaccagaaaaagatgtttaataaccactcgggcc

SEQ ID NO: 550 - DNA, 4069 bp, Homo sapiens
ggcgtctgggaagtgaggagcgtctctgcctggcagaggctgcaatctctgcactttggggggccaaggcaggcgctgagaaggacgcgcagtccatctctctcaggttagtgaaatgaggctctccgcggggccggcccggggacagtgcgctgctggtcccagcatgaatgcgggccccggctgtgaaccctgcaccaaagcgacccgctggggcgccgctacaacttcgccggctgcttcggacgcccggagctttccgagcaggcagaggcgcgtcctcgaccccaaggacgctcacgtgcagttcagggtcccaccgtcctcgccagcctgcgtcccagggcaggcgggacagcacagaggcagcgccacctcgcttgttttcaaacaaaagactattaccagttggatggacactaaaggaatcaagacagcggaatcagaaagtttggatagtaaagaaaacaacaatacaagaatagaatccatgatgagttctgtacaaaaagataacttttaccaacataatgtagaaaaattagtaaatgtttctcagctaagtcttgataagtcactcactgaaaaaagtacacagtatttgaaccagcatcagactgcagcaatgtgtaagtggcaaaatgaagggaaacacacggagcagcttttggaaagtgaacctcaaacagtaaccctggtaccagagcagtttagtaatgctaacattgatcggtcacctcaaaatgatgatcacagtgacacagatagtgaagagaatagagacaatcaacagtttctcacaactgtaaagcttgcaaatgcaaagcagactacggaagatgaacacgccagagaagccaaaagccaccagaagtgcagcaagtcttgccatcctggggaagactgtgcaagttgtcagcaagatgagatagacgtggtgccaaagagtccattgtcagatgttggctctgaggatgttggtactgggtcaaaaaatgacaacaaattgattagacaagaaagttgcctaggaaattctcctccatttgagaaggaaagtgaacccgaatcaccgatggatgtggataattctaaaaatagttgtcaagactcagaagcagatgaggagacaagtccaggttttgatgaacaagaagatggtagttcctcccaaacagcaaataaaccttcaaggttccaagcaagagacgctgacattgaatttaggaaacggtactctactaagggcggtgaagttagattacatttccaatttgaaggaggagagagtcgcactggaatgaatgatttaaatgctaaactacctggaaatatttctagcctgaatgtagaatgcagaaattctaagcaacatggaaaaaaggattctaaaatcacagatcatttgatgagactgcccaaagcagaggacagaagaaaagaacagtgggaaaccaaacatcaaagaacagaaaggaagatccctaaatacgttccacctcacctttctccagataagaagtggcttggaactcccattgaggagatgagaagaatgcctcggtgtgggatccggctgcctctcttgagaccatctgccaatcacacagtaactattcgggtagatcttttgcgagcaggagaagttcctaaaccttttccaacacattataaagatttgtgggataacaagcatgttaaaatgccttgttcagaacaaaatttgtacccagtggaagatgagaatggtgagcgaactgcggggagccggtgggagctcattcagactgcacttctcaacaaatttacacgaccccaaaacttgaaggatgctattctgaaatacaatgtggcatattctaagaaatgggactttacagctttgatcgatttctgggataaggtacttgaagaagcagaagctcaacatttatatcagtccatcttgcctgatatggtgaaaattgcactctgtctgccaaatatttgcacccagccaataccactcctgaaacagaagatgaatcattccatcacaatgtcgcaggaacagattgccagtcttttagctaatgctttcttctgcacatttccacgacgaaatgctaagatgaaatcggagtattctagttacccagacattaacttcaatcgattgtttgagggacgttcatcaaggaaaccggagaaacttaaaacgctcttctgctactttagaagagtcacagagaaaaaacctactgggttggtgacatttacaagacagagtcttgaagattttccagaatgggaaagatgtgaaaaacccttgacacgattgcatgtcacttacgaaggtaccatagaagaaaatggccaaggcatgctacaggtggattttgcaaatcgttttgttggaggtggtgtaaccagtgcaggacttgtgcaagaagaaatccgctttttaatcaatcctgagttgattatttcacggctcttcactgaggtgctggatcacaatgaatgtctaattatcacaggtactgagcagtacagtgaatacacaggctatgctgagacatatcgttggtcccggagccacgaagatgggagtgaaagggacgactgcgagcggcgctgcactgagatcgttgccatcgatgctcttcacttcagacgctacctcgatcagtttgtgcctgagaaaatgagacgcgagctgaacaaggcttactgtggatttctccgtcctggagtttcttcagagaatctttctgcagtggccacaggaaactggggctgtggtgcctttgggggtgatgccaggttaaaagccttaatacagatattggcagctgctgcagctgagcgagatgtggtttatttcacctttggggactcagaattgatgagagacatttacagcatgcacattttccttactgaaaggaaactcactgttggagatgtgtataagctgttgctacgatactacaatgaagaatgcagaaactgttccacccctggaccagacatcaagctttatccattcatataccatgctgtcgagtcctgtgcagagaccgctgaccattcagggcaaaggacagggacctgaggagccgagcgaatagcatctcctcccacctcccaccagagacgtcctgtttgagctgtcaggtgtaatatatgaattgacttaagttaatataaatgtgtacataatccacatttgtagtcaaggacgcaatctcttccacacatgtgcagttgtcagttggtacatctaaactccctccatcctgactcacgtggacttagatatgttttgtttctattttcttctatttcagtttttcattctttgatgtttatttcttttgtccatcagatctcttgtgaaatcccatggaaggttgtgctcagctgtcgggtctctttcttcctgcccatatattataccagttgcttctgcagcccgcagatgcccagcgatgcccaggaaacaagttgaaatcccaggaatctctttaactgattttgctaaaaatctccctgtgagccttccactcaactcttaatatgcttgcattgtttaagtttttaaattctgaaaattaataattagggtttttttcatatgtgttgcataatgcaaacctcctaggttaaaatagtttctttatttaagatagaataatttccagaaattgtacttttgaggtatcatttttatctgtaatggtttgtctgtcttttttcctctgatcagtatttttttataccagttttggagactgcctgagatgaaaggaaatgtggaataaaaggaggttttcctgatgtggtgtaaagaaaacagattccaagagaattgaagattttttttgtttccttggtacttttttctttttaaattaggactaatgtttcttttgtggtgcttgaggcatattcatataaccaaagtttgagaactgggaacttcatgctgatttgtacatattgaagtttctctggtattcaaaggttatatagtgaatgaattttcattaataaatcactttgtcagaaaaaaaaaaaaaaaaaa

SEQ ID NO: 551 - DNA, 1696 bp, Homo sapiens
gcatcccggcatctgcacgtggttatgctgccggagtttgggccgccactgtaggaaaagtaacttcagctgcagccccaaagcgagtgagccgagccggagccatggagggccagagcgtggaggagctgctcgcaaaggcagagcaggacgaggcagagaagttgcaacgcatcacggtgcacaaggagctggagctgcagtttgacctgggcaacctgctggcgtcggaccggaaccccccgaccgggctgcggtgcgccggacccacgccggaggccgagctacaggccctggcgcgggacaacacgcaactgctcatcaaccagctgtggcagctgcccacggagcgcgtggaagaggcgatagtggcgcggctgccggagcccaccacacgcctgccgcgagagaagcctctgccccgaccgcggccacttacacgctggcagcagttcgcgcgcctcaagggcatccgtcccaagaagaagaccaacctggtgtgggacgaggtgagtggccagtggcggcggcgctggggctaccagcgcgcccgggacgacaccaaagaatggctgattgaggtgcccggcaatgccgaccccttggaggaccagttcgccaagcggattcaggccaagaaggaaagggtggccaagaacgagctgaaccggctgcgtaacctggcccgcgcgcacaagatgcagctgcccagcgcggccggcttgcaccctaccggacaccagagtaaggaggagctgggccgcgccatgcaagtggccaaggtctccaccgcctctgtggggcgctttcaggagcgcctccccaaggagaaggtgccccggggctccggcaagaaaaggaagtttcaaccccttttcggggactttgcagccgagaaaaagaaccagttggagctgcttcgtgtcatgaacagcaagaagcctcagctggatgtgactagggccaccaataagcagatgagggaggaggaccaggaggaggccgccaagaggaggaaaatgagccagaagggcaagagaaagggaggccggcaggggcctgggggcaagaggaaagggggcccgcccagccagggagggaagaggaaagggggcttgggaggcaagatgaattctgggccgcctggcttgggtggcaagagaaaaggaggacagcgcccaggaggaaagaggaggaagtaatagtttctaactgtcggacccgtctgtaaaccaaggactatgaatactaaatgttaagttctaggcaattatacggggactcagaaggacctggccgctgccttcattgagtttaaagggacaggattgcccttccgtcaagaaagtatgtaagtgttggactgcacaaattaatgtttttcccacaaccgagactttggagattaagaacttatttgaggatttaagaattagggaaataatttggtggaaaccgggaatgagttctattcttaaacagcctttttttttctttttaatgttggatatacggcgaggtagagttggccatatttcagagacttagattgacgtatatgtttctgcattatttttacaacaagtttgtgtatcagagcgggagttcgggggagggaaagaaaacaaacagtttcagaattgaataggcaagtgactgttttaaagattaagtaataaagatgtcttatctagtg

SEQ ID NO: 552 - DNA, 1685 bp, Homo sapiens
cctgaaaagccacctcagattcagccaacaaagattgctgatttgctccttaagcaagagattcactgctgctcagcatggctcagaccaactcatgcttcatgctgatctcctgcctgatgttcctgtctctgagccaaggacaggaggcccatgctgagttgcccaaggcccagatcagctgcccagaaggcaccagtgcctaaggctcccactgctactactttaatgaagagcatgagacctgggtttatgcagatctctactgccagaacatgaattcaggtaacctggtgtctgtgctcacccaggctgagggtgcctttgtggcttcgctgattaaagagagtggcaccaaggatagcaatgtctggattggcctccatgacccccaccggatcagtctgctgcatcttctacctcctgattatcaggttccagagggtctgatgtctggcacctcaagcatcagtttttactatattatgataaaagcaacctctctataaatcatataatgtaaaggatatcaaggttctccataggttcttcgagataagcttaaagctgaatttcctgtgtgtttcaggcattcacagataaactcattctctgtacttctagggtagcatctttatgtatctattatgtacctcttatctattgtgttatcatctctgttatagaagagccttctgtagaccatatagaaaaagattatagaggaggagaatctactgctggcaattgggaaccgcaaggtatactaaataatatatcaacaactaatggccatctaatgctatgctggatatgaacttttggggcctcaggaaagaaaaaccaggaactagtttcaataatgaggtgtcatggttccctgtggcaaatttagaacacttatcgtttggcaggacacagagaggtaggtgaacattccaggaaagaagcagcttagagaaaatgtggaggaaataatatgacacttagagaaaaaggaaggtttattcttgtcttatgtcttgacctgtttctgagtgcgaacacaaaccaggtgtttctgtctctttctgagtcacgtctgcccctgttctggcccttccccatctagaactgccattatcagtggagtagtgggtccctggtctcctacaaatcctgggacattggatccccaagctgtgccaatactgcctactgtgctagcctgacttcaagctcaggtgagaggcacagaatccacacacttattgccatcctctcctatttatctctgaggatcgaccggggactgggatagaggaagggtgagctcctcattcaggaaatagaggagtgtttcctctttatttttgctgagtcctgcagccaggagggtaatacactctgatcccctcagtctgaatcttctcattgtcttataggattcaagaaatggaaggatgattcttgtaaggagaagttctcctttgtttgcaagttcaaatactggaggcaattgtaaaatggacgtctagaattggtctaccagttactatggagtaaaagaattaaactggaccatctctctccatatcaatctggaccatctctcctctgctaaatttgcatgactgatctttagtatctttacctacctcaatttctggagccctaaacaataaaaataaacatgtttcccccat

SEQ ID NO: 553 - DNA, 2718 bp, Homo sapiens
gaattccgctaagggatcagaaaactcgctggttaatgagtggccaagaacatatcagcttaagtttgggaaaaacacacaacagggcattgtgtcagagggtgaccaaagtgactccccagcagatggaccagggaacgaacaggtgacctttgaactgaggccggagtggaagcagcgagggtgtgaagggccgggtgagggtcaaaggcagaagcaagcaggtggggagggttagcgtcatgcctgctaaggagcagtggacgggtcctagcacgtcctgtgagccacccgctgtccagggagcggttacctctgtcttgccagcttcgtggggacagatagttcagctcatcatttatgagacagagaatgggaatttggagggtctgtggctggcctcgtcctgggtgcgcagggggtcacctgaggtgtggtctgaggcctccggggaagggcatttctttgcaggacgcagtttccaggctcaagagcgtggagggaattcctaagggtcgctcttcaccaagagcgcagagccctggtagacctcagcatcgtcacagagaaagctgtgggtgcagaggccttggggacaaggcggggacggaatttcgtatttcagatgaccaaggccaatggccaagtgtgagttcttcaacgcgggcgggagcgtgaaggaccgcatcagcctgcggatgattgaggatgctgagcgcgacgggacgctgaagcccggggacacgattatcgagccgacatccgggaacaccgggatcgggctggccctggctgcggcagtgaggggctatcgctgcatcatcgtgatgccagagaagatgagctccgagaaggtggacgtcctgcgggcactggggcctgagattgtgaggacgcccaccaatgccaggttcgactccccggagtcacacgtgggggtgtcctgccgtctgaagaacgaaatccccaattctcacatcctagaccagtaccgcaacgccagcaaccccctggctcactatgacaccaccgctgatgagatcctgcagcagtgtgatgggaagctggacatgctggtggcttcagtgggcacgggcggcaccatcacgggcattgccaggaagctgaaggagaagtgtcctggatgcaggatcattggggtggatcccgaagggtccatcctcgcagagccggaggagctgaaccagacggagcagacaacctacgaggtggaagggatcggctacgacttcatcaccacggtgctggacaggacggtggtggacaagtggttcaagagcaacgatgaggaggcgttcacctttgcccgcatgctgatcgcgcaagaggggctgctgtgcggtggcagtgctgacagcacggtggcggtggccgtgaaggctgcgcaggagctgcaggagggccagcgctgcgtggtcattctgcccgactcagtgcggaactacatgaccaagttcctgagcgacaggtggatgctgcagaagggctttctgaaggaggaggacctcacggagaagaagccctggtggtggcacctccgtgttcaggagctgggcctgtcagccccgctgaccgtgctcccgaccatcacctgtgggcacaccatcgagatcctccgggagaagggcttcgaccaggcgcccgtggtggatgaggcgggggtaatcctgggaatggtgacgcttgggaacatgctctcgtccctgcttgccgggaaggtgcagccgtcagaccaagttggcaaagtcatctacaagcagttcaaacagatccgcctcacggacacgctgggcaggctctcgcacatcctggagatggaccacttcgccctggtggtgcacgagcagatccagtaccacagcaccgggaagtccagtcagcggcagatggtgttcggggtggtcaccgccattgacttgctgaacttcgtggccgcccaggagcgggaccagaagtgaagtccggagcgctgggcggtgcggagcgggcccgccacccttgcccacttctccttcgctttcctgagccctaaacacacgcgtgattggtaactgcctggcctggcaccgttatccctgcacacggcacagagcatccgtctcccctcgttaacacatggcttcctaaatggccctgtttacggcctatgagatgaaatatgtgattttctctaatgtaacttcctcttaggatgtttcaccaaggaaatattgagagagaagtcggccaggtaggatgaacacaggcaatgactgcgcagagtggattaaaggcaaaagagagaagagtccaggaaggggcggggagaagcctgggtggctcagcatccctccacgggctgccccgtctgctcggggctgagctggcgggagcagtttgcgtgtttgggttttttaattgagatgaaattcaaataacctaaaaatcaatcacttgaaagtgaacaatcagcggcatttagtacatccagaaagttgtgtaggcaccacctctgtcacgttctggaacattctgtcatcaccccgtgaagcaatcatttcccctcccgtcttcctcctcccctggcaactgctgatcgactttgtgtctctgttgtctaaaataggttttccctgttctggacatttcatataaatggaatcacaccaaaaaaaaaaaaaaaaaaaaaaaaaaaaaaaaaaaaaaaaaacggaattc

SEQ ID NO: 554 - DNA, 748 bp, Homo sapiens
caagacaacattttaggcaaaatcagcctgagcaagatgtgctgaagatgggaagcgtctgagttgatctgtgcaccttttcttgtctcccctcgttctagggagattcgggaggccctctgtcctgcaaacacaatgaggtctggcatctggtaggcatcacgagctggggcgaaggctgtgctcaaagggagcggccaggtgtttacaccaacgtggtcgagtacgtggactggattctggagaaaactcaagcagtgtgaatgggttcccaggggccattggagtccctgaaggacccaggatttgctgggagagggtgttgagttcactgtgccagcatgcttcctccacagtaacacgctgaaggggcttggtgtttgtaagaaaatgctagaagaaaacaaactgtcacaagttgttatgtccaaaactcccgttctatgatcgttgtagtttgtttgagcattcagtctctttgtttttgatcacgcttctatggagtccaagaattaccataaggcaatgtttctgaagattactatataggcagatataccagaaaataaccaagtagtggcagtggggatcaggcagaagaactggtaaaagaagccaccataaatagatttgttcgatgaaagatgaaaactggaagaaaggagaacaaagacagtcttcaccattttgcaggaatctacactctgcctatgtgaacacatttcttttgtaaagaaagaatttgatt

SEQ ID NO: 555 - DNA, 338 bp, Homo sapiens
gagagcatcactcagcgcatggcaataatagaaggaaagaataagatggctagcaccttggttgtggctgactctagaatttctggaatctacatttgcatagcttccaataaagttgggactgtgggaagaaacataagcttttatatcacagaattgtcaaactttgagtgccttcatccttgctctcaggaatagaactctacctcatcggatctcatgtgccaaatgggtttcatgttaacttggaaaaaatgccgacggaaggagaggacctgaaactgtcttgcacagttaacaagttcttatacagagacgttacttggattttactgcgg

SEQ ID NO: 556 - DNA, 1424 bp, Homo sapiens
aggagccttaggaggtacggggagctcgcaaatactccttttggtttattcttaccaccttgcttctgtgttccttgggaatgctgctgtgcttatgcatctggtctctttttggagctacagtggacaggcatttgtgacagcactatgggactgagtaacattctctttgtgatggccttcctgctctctggtgctgctcctctgaagattcaagcttatttcaatgagactgcagacctgccatgccaatttgcaaactctcaaaaccaaagcctgagtgagctagtagtattttggcaggaccaggaaaacttggttctgaatgaggtatacttaggcaaagagaaatttgacagtgttcattccaagtatatgggccgcacaagttttgattcggacagttggaccctgagacttcacaatcttcagatcaaggacaagggcttgtatcaatgtatcatccatcacaaaaagcccacaggaatgattcgcatccaccagatgaattctgaactgtcagtgcttgctaacttcagtcaacctgaaatagtaccaatttctaatataacagaaaatgtgtacataaatttgacctgctcatctatacacggttacccagaacctaagaagatgagtgttttgctaagaaccaagaattcaactatcgagtatgatggtattatgcagaaatctcaagataatgtcacagaactgtacgacgtttccatcagcttgtctgtttcattccctgatgttacgagcaatatgaccatcttctgtattctggaaactgacaagacgcggcttttatcttcacctttctctatagagcttgaggaccctcagcctcccccagaccacattccttggattacagctgtacttccaacagttattatatgtgtgatggttttctgtctaattctatggaaatggaagaagaagaagcggcctcgcaactcttataaatgtggaaccaacacaatggagagggaagagagtgaacagaccaagaaaagagaaaaaatccatatacctgaaagatctgatgaagcccagcgtgtttttaaaagttcgaagacatcttcatgcgacaaaagtgatacatgtttttaattaaagagtaaagcccatacaagtattcattttttctaccctttcctttgtaagttcctgggcaacctttttgatttcttccagaaggcaaaaagacattaccatgagtaataagggggctccaggactccctctaagtggaatagcctccctgtaactccagctctgctccgtatgccaagaggagactttaattctcttactgcttcttttcacttcagagcacacttatgggccaagcccagcttaatggctcatgacctggaaataaaatttaggaccaataaaaaaaaaaaaaaaaaaaa

SEQ ID NO: 557 - DNA, 1306 bp, Homo sapiens
ggccatgaggttgatcctgttttttggtgccctttttgggcatatctactgtctagaaacatttgtgggagaccaagttcttgagattgtaccaagcaatgaagaacaaattaaaaatctgctacaattggaggctcaagaacatctccagcttgatttttggaaatcacccaccaccccaggggagacagcccacgtccgagttcccttcgtcaacgtccaggcagtcaaagtgttcttggagtcccagggaattgcctattccatcatgattgaagacgtgcaggtcctgttggacaaagagaatgaagaaatgctttttaataggagaagagaacggagtggtaacttcaattttggggcctaccataccctggaagagatttcccaagaaatggataacctcgtggctgagcaccctggtctagtgagcaaagtgaatattggctcttcttttgagaaccggcctatgaacgtgctcaagttcagcaccggaggagacaagccagctatctggctggatgctgggatccatgctcgagagtgggttacacaagctacggcactttggacagcaaataagattgtttctgattatggaaaggacccatccatcacttccattctggacgccctggatatcttcctcctgccagtcacaaaccctgatggatacgtgttctctcaaaccaaaaatcgtatgtggcggaagacccggtccaaggtatctggaagcctctgtgttggtgtggatcctaaccggaactgggatgcaggttttggaggacctggagccagcagcaacccttgctctgattcataccacggacccagtgccaactctgaagttgaagtgaaatccatagtggacttcatcaagagtcatggaaaagtcaaggccttcattatcctccacagctattcccagctgctgatgttcccctatgggtacaaatgtaccaagttagatgactttgatgagctgagtgaagtggcccaaaaggctgcccaatctctgagaagcctgcatggcaccaagtacaaagtgggaccaatctgctctgtcatctaccaagccagtggaggaagcattgactggtcctatgattatggcatcaagtactcatttgcctttgaactgagagacacagggcgctacggcttcctcttgccagcccgtcagatcctgcccacagccgaggagacctggcttggcttgaaggcaatcatggagcatgtgcgagaccacccctattagggccctggggaagaaacaagagccattaaaatctctttggtttgaagc

SEQ ID NO: 558 - DNA, 1800 bp, Homo sapiens
ggaaggcgcgcctgccgaggcgagctaagcgcccgctcgccatggggagccccgcacatcggcccgcgctgctgctgctgctgccgcctctgctgctgctgctgctgcgcgtcccgcccagccgcagcttcccaggatcgggagactcaccactagaagacgatgaagtcgggtattcacaccctagatataaagataccccgtggtgctcccccatcaaggtgaagtatggggatgtgtactgcagggcccctcaaggaggatactacaaaacagccctgggaaccaggtgcgacattcgctgccagaagggctacgagctgcatggctcttccctactgatctgccagtcaaacaaacgatggtctgacaaggtcatctgcaaacaaaagcgatgtcctacccttgccatgccagcaaatggagggtttaagtgtgtagatggtgcctactttaactcccggtgtgagtattattgttcaccaggatacacgttgaaaggggagcggaccgtcacatgtatggacaacaaggcctggagcggcgccagcctcctgtgtggatatggacctcctagaatcaagtgcccaagtgtgaaggaacgcattgcagaacccaacaaactgacagtccgtgtctgggagacacccgaaggaagagacacagcagatggaattcttactgatgtcattctaaaaggcctccccccaggctccaactttccagaaggagaccacaagatccagtacacagtctatgacagagctgagaataagggcacttgcaaatttcgagttaaagtaagagtcaaacgctgtggcaaactcaatgccccagagaatggttacatgaagtgctccagcgacggtgataattatggagccacctgtgagttctcctgcatcggcggctatgagctccagggtagccctgcccgagtatgtcaatccaacctggcttggtctggcacggagcccacctgtgcagccatgaacgtcaatgtgggtgtcagaacggcagctgcacttctggatcagttttatgagaaaaggagactcctcattgtgtccacacccacagcccgaaacctcctttaccggctccagctaggaatgctgcagcaagcacagtgtggccttgatcttcgacacatcaccgtggtggagctggtgggtgtgttcccgactctcattggcaggataggagcaaagattatgcctccagccctagcgctgcagctcaggctgttgctgcgaatcccactctactccttcagtatggtgctagtggataagcatggcatggacaaagagcgctatgtctccctggtgatgcctgtggccctgttcaacctgattgacacttttcccttgagaaaagaagagatggtcctacaagccgaaatgagccagacctgtaacacctgacatgatggttcctctcttggcaattcctcttcattgtctacatagtgacatgcacacgggaaagccttaaaaatatccttgatgtacagattttatttgtaatttaaaagtctattttattatgagctttcttgcacttaaaaattagcatgctgctttttgtacttggaagtgtttcaaaaaattatatgaccatatttactctttctaactttctttactccatcatggctggttgattttgtagagaaattagaacccataaccatacacaggctatcaacatgttattcaatgtgacacctaactcttttctattttgttttttaagtaagacttttattaataaaacaaaatgttttggaaaaaaaaa

SEQ ID NO: 559 - DNA, 3337 bp, Homo sapiens
gtcgagcctctagcccgcccgggtttccttcgcagtcgcgcaccgacgctcaaacgcgcgctccaacccgcagcctcctcctgcctcaccgcccgaagatggcggctctcaaactcctctcctccgggcttcggctctgcgcctctgcccgcggatctggggcaacctggtacaagggatgtgtttgttccttttccaccagtgctcatcgccataccaagttttatacagatccagtagaagctgtaaaagacatccctgatggtgccacggttttggttggtggttttgggctatgtggaattccagagaatcttatagatgctttactgaaaactggagtaaaaggactaactgcagtcagcaacaatgcaggggttgacaattttggtttggggcttttgcttcggtcgaagcagataaaacgcatggtctcttcatatgtgggagaaaatgcagaatttgaacgacagtacttatctggtgaattagaagtggagctgacaccacagggcacacttgcagagaggatccgtgcaggcggggctggagttcctgcattttacaccccaacagggtatgggaccctggtacaagaaggaggatcgcccatcaaatacaacaaagatggcagtgttgccattgccagtaagccaagagaggtgagggagttcaatggtcagcactttattttggaggaagcaattacaggggattttgctttggtgaaagcctggaaggcggaccgagcaggaaacgtgattttcaggaaaagtgcaaggaatttcaacttgccaatgtgcaaagctgcagaaaccacagtggtagaggttgaagaaattgtggatattggagcatttgctccagaagacatccatattcctcagatttatgtacatcgccttataaagggagaaaaatatgagaaaagaattgagcgtttatcaatccggaaagagggagatggggaagccaaatctgctaaacctggagatgacgtaagggaacgaatcatcaagagggccgctcttgagtttgaggatggcatgtatgctaatttgggcataggaatccctctcctggccagcaattttatcagcccaaatataactgttcatcttcaaagtgaaaatggagttctgggtttgggtccatatccacgacaacatgaagctgatgcagatctcatcaatgcaggcaaggaaacagttactattcttccaggagcctcttttttctccagcgatgaatcatttgcaatgattagaggtggacacgtcgatctgacaatgctaggagcgatgcaggtttccaaatatggtgacctggctaactggatgatacctgggaagatggtgaaaggaatgggaggtgctatggatttagtgtccagtgcgaaaaccaaagtggtggtcaccatggagcattctgcaaagggaaatgcacataaaatcatggagaaatgtacattaccattgactggaaagcaatgtgtcaaccgcattattactgaaaaggctgtgtttgatgtggacaagaagaaagggttgactctgattgagctctgggaaggcctgacagtggatgacgtacaaaagagtactgggtgtgattttgcagtttcaccaaaactcatgccaatgcagcagatcgcaaattgaaatatggatatttgtaccaggctgcgtgtttttcattttaaacacacaagatttaattgaaaggacatcaataatcataattgtgtatttaacaggtggttttttattagttttcttgtgtttcagactttatgcagccatataaactgttctctaggcatgctgtgacattttaataaaaagcaaaaggagcatttataattatctcatttgttaaggctgagaaggttgtttttataataggtaattatattgaatgcattttcactgaatatggtatgtatgctaaattatatgaacctttccccaagaagggccctagaaattgatgtggctttcctcttaaatattaattattagtcctgaaagaaagataacatatgtgatttttgtggttaggagagttgctgtcatgattgttttttcttcagcctcctctgacttttcttttggggcttcagattttatgattacatcttgtccccctagaacatcccccttcctcccatactgcttttaaacagatgcccaagaaggcaagcaggaatgcctcttgtgggggagggcagggagaaataactagttcaaaccaactatctatctatgctttgcaaagactaaggcgtattataggaagagggctagaaacctaactgattcttctcagttttctcattttaaaacagcccagtattcctttgtatcctcaagggtccttgagaatacttctgttattgaaaccctgtgggctacttgtactgtacctcctctcaagccaagaagggctgtgggataatttaccatgaatccttagtagcaatgacagcagagttaaaaaataaaaggtgttttactttcaggctcttgttttggttcagaggagattttaaatattgaatgacacttctacagaacaacggtttttcttctgccaaggctacttcctttaacgaagtgcctttaattcagccttatccaactagggaaaataatgttggacaagtctaggatttgaagagtcagtgaacttttagtgtcagggaataaacatggtgggtagattaggtttgaaaaaaacttccttagaggtatttattctcaatacctgacaggggcccatgggaatgacttcagaagcatcccggataatagatgggtaaaaagtctaggcaccctgaagaacaggtgagacagctggcctctggacagaggtaggcatagtacagtacgatatatcattcctctggtcctaaatatacaaacttattcatgtttttaggtgatgatggtcattgaaactcacttcttttcaggtgtagctacaattgtgtaatgtacaatattagagaaaggacaggctttttatgagtaacacacaccatatataaaacagcctttctggctgaccacatggttaaatgcataccttcccagtactggggggaaaatgacccttcttagaatgtgcaagttccatagagtaatatattgatatgattttgaaaagaattgttgatagttacatcttcaaacttatcattccagtatgcatctttaagataatgtgattctaagtagatgactttatattcttgattaaagagtgctatacatgttaagaaatgcattaaggaatacaataaatattctaaactgatgaaaaaaaaaaaaaaaaa

SEQ ID NO: 560 - DNA, 1648 bp, Homo sapiens
tggccgacacccgcagggacgcccgccggacgagcacgcggagggccctcgcctccacggatgcaccatgccggtgtgaggagcatctgttcttcccactctctgcagttaacaaacccaacccaaaccaccacaggtgctcctcctggggagtttcctgtctgacaaatgccaggctcacttcaaggagaatcacgcttctttctaaagatggattcaccatttaaaacagagctctgggagcctttcggcaaatcttgaaagctgcacggtgcagagacatggatgtgacttcccaagcccggggcgtgggcctggagatgtacccaggcaccgcgcagcctgcggcccccaacaccacctcccccgagctcaacctgtcccacccgctcctgggcaccgccctggccaatgggacaggtgagctctcggagcaccagcagtacgtgatcggcctgttcctctcgtgcctctacaccatcttcctcttccccatcggctttgtgggcaacatcctgatcctggtggtgaacatcagcttccgcgagaagatgaccatccccgacctgtacttcatcaacctggcggtggcggacctcatcctggtggccgactccctcattgaggtgttcaacctgcacgagcggtactacgacatcgccgtcctgtgcaccttcatgtcgctcttcctgcaggtcaacatgtacagcagcgtcttcttcctcacctggatgagcttcgaccgctacatcgccctggccagggccatgcgctgcagcctgttccgcaccaagcaccacgcccggctgagctgtggcctcatctggatggcatccgtgtcagccacgctggtgcccttcaccgccgtgcacctgcagcacaccgacgaggcctgcttctgtttcgcggatgtccgggaggtgcagtggctcgaggtcacgctgggcttcatcgtgcccttcgccatcatcggcctgtgctactccctcattgtccgggtgctggtcagggcgcaccggcaccgtgggctgcggccccggcggcagaaggcgctccgcatgatcctcgcggtggtgctggtcttcttcgtctgctggctgccggagaacgtcttcatcagcgtgcacctcctgcagcggacgcagcctggggccgctccctgcaagcagtctttccgccatgcccaccccctcacgggccacattgtcaacctcaccgccttctccaacagctgcctaaaccccctcatctacagctttctcggggagaccttcagggacaagctgaggctgtacattgagcagaaaacaaatttgccggccctgaaccgcttctgtcacgctgccctgaaggccgtcattccagacagcaccgagcagtcggatgtgaggttcagcagtgccgtgtagacagccttggccgcataggcccagccagggtgtgactcgggagctgcacacacctgggtggacacaaggcacggccacgtcatgtctctaaactgcggtcagatgtggcttctggctcctcggggcctcgcgagggtcacgcttgcctggtcaccctggggctgcttaagaaacctcacgactggtcaccttgcactcctcacacagaattgctacaatcccaaagcgctcgccccgca

SEQ ID NO: 561 - DNA, 144 bp, Homo sapiens
cattgtccagctccaagatggtatcccgtaaggctgtggctgctctgctggtggtgcatgtagctgccatgctggcctcccagacggaagccttcgtccccatcttcacctatggcgaactccagaggatgcaggtaaagaacc

SEQ ID NO: 562 - DNA, 7878 bp, Homo sapiens
ctaaaaataccattaagtaatagtattagcttttgtattctgagattcaacagcagcagtcacttccctccactcctatgtgtatcccaggaccaccctgggcggggagggctgaggtcagggaggtctgaagctggtcctgggctccgggggtgacagtgatgaggaactgggtgcacacatgagtggggcagccgggcctggccagagaagcaacacacacgtgcacagacatgtttatccacatacacatgtgcacgcatgtgcacaaacacattgcaggcaggcatgttgacgcctcaggcagcggaggaccctgactctgggccctgctgacccgggcaaggcccattgtgatgcgtgccatgacctcagaatgtcactggtgcttagcacctatccgctctccagactgcgtctgtgttctacggcagttacacacacgcagtggtattcacaagcggttttgtggactcaaaggttttctccctgagaggcataacccaggccagctgattcatcagaatcaggtgagtgtgacctgctctcttccctccaggctgacttggggacagtggctatggtatgggcggtgttggcctctgggcagctacagaggagggtcatccctgagcactcaccgggcgcccgttctacactgcccatgtagacgattttctctttcgtcttcatggtggcttcgtagagtgggtgctgttcccaaatgtacccattcgacaggtgagccgtctggggtcagagaggcagtaactggcctgggaatccagacaagaccctgggttttgctctcagccctgctgtgtgccatgctagacttcaggcctcaaccctgagacctccctgctctagatcccaaatctgcccagatttccgatccaatgggcagagcctggccctggcagagacactgggatggatccactgtgggtggggaggagggaagggtcctcagaacacacctggggcctaagctgggtcttgatggtcactgtgggacccactggacacacacagtcccttgtctgggagtggcatggggagccttctgcccttgggcagttgtggaaagtgaaggagccctggagagctggctgaggggagactatcttcccttgtgttcaaaggggtccaggcactggggctctccccaagtatttcttattctgtctggcctcgctttccttttgccctgagtattctcaggagggacggtccatctagatgtcctccaggagcaaggacccactgttcttcatcagtgacccaggaaaatgaagccccctcctgtggggacagctcagaatggtggagtccacagtccctccctgagagacatggtttccatgagcacagtggctgctttggagacagtaatcattttcatccccaaaaccaaacacactcctgctcaaatggtgttattgctaaagcagcttcactggttagactgaagggccatggtagcccaagtgatgagcggggtagaatggagcagtcaggagagatcttgttccccgtaggaaactgggcatctctgtggccctgaacatcccaggaggccgatcgtacagagacctctggtgcctgaccgcagttcacatccacatccctggaatagaccatcacaggctcttcacccttggcaggtggacaccattcaacctgccggggcaggatggacatggtagagaatgcagatagtttgcaggcacaggagcggaaggacatacttatgaagtatgacaagggacaccgagctgggctgccagaggacaaggggcctgagcccgttggaatcaacagcagcattgatcgttttggcattttgcatgagacggagctgcctcctgtgactgcacgggaggcgaagaaaattcggcgggagatgacacgaacgagcaagtggatggaaatgctgggagaatgggagacatataagcacagtagcaaactcatagatcgagtgtacaagggaattcccatgaacatccggggcccggtgtggtcagtcctcctgaacattcaggaaatcaagttgaaaaaccccggaagataccagatcatgaaggagaggggcaagaggtcatctgaacacatccaccacatcgacctggacgtgaggacgactctccggaaccatgtcttctttagggatcgatatggagccaagcagagggaactattctacatcctcctggcctattcggagtataacccggaggtgggctactgcagggacctgagccacatcaccgccttgttcctcctttatctgcctgaggaggacgcattctgggcactggtgcagctgctggccagtgagaggcactccctgccaggattccacagcccaaatggtgggacagtccaggggctccaagaccaacaggagcatgtggtacccaagtcacaacccaagaccatgtggcatcaggacaaggaaggtctatgcgggcagtgtgcctcgttaggctgccttctccggaacctgattgacgggatctctctcgggctcaccctgcgcctgtgggacgtgtatttggtggaaggagaacaggtgttgatgccaataaccagcattgctcttaaggttcagcagaagcgcctcatgaagacatccaggtgtggcctgtgggcacgtctgcggaaccaattcttcgatacctgggccatgaacgatgacaccgtgctcaagcatcttagggcctctacgaagaaactaacaaggaagcaaggggacctgccacccccagccaaacgcgagcaagggtccttggcacccaggcctgtgccggcttcacgtggtgggaagaccctctgcaaggggtataggcaggcccctccaggcccaccagcccagttccagcggcccatttgctcagcttccccgccatgggcatctcgtttttccacgccctgtcctggtggggctgtccgggaagacacgtaccctgtgggcactcagggtgtgcccagcctggccctggctcagggaggacctcagggttcctggagattcctggagtggaagtcaatgccccggctcccaacggacctggatatagggggcccttggttcccccattatgattttgaacggagctgctgggtccgtgccatatcccaggaggaccagctggccacctgctggcaggctgaacactgcggagaggttcacaacaaagatatgagttggcctgaggagatgtcttttacagcaaatagtagtaaaatagatagacaaaaggttcccacagaaaagggagccacaggtctaagcaacctgggaaacacatgcttcatgaactcaagcatccagtgcgttagtaacacacagccactgacacagtattttatctcagggagacatctttatgaactcaacaggacaaatcccattggtatgaaggggcatatggctaaatgctatggtgatttagtgcaggaactctggagtggaactcagaagagtgttgccccattaaagcttcggcggaccatagcaaaatatgctcccaagtttgatgggtttcagcaacaagactcccaagaacttctggcttttctcttggatggtcttcatgaagatctcaaccgagtccatgaaaagccatatgtggaactgaaggacagtgatggccgaccagactgggaagtagctgcagaggcctgggacaaccatctaagaagaaatagatcaattattgtggatttgttccatgggcagctaagatctcaagtcaaatgcaagacatgtgggcatataagtgtccgatttgaccctttcaattttttgtctttgccactaccaatggacagttacatggacttagaaataacagtgattaagttagatggtactacccctgtacggtatggactaagactgaatatggatgaaaagtacacaggtttaaaaaaacagctgagggatctctgtggacttaattcagaacaaatcctactagcagaagtacatgattccaacataaagatttctcctcttcaccatctacaaatggaatgttcaccctaactaccaatggggacctacccaaaccaatattcatccccaatggaatgccaaacactgttgtgccatgtggaactgagaagaacttcacaaatggaatggttaatggtcacatgccatctcttcctgacagcccctttacaggttacatcattgcagtccaccgaaaaatgatgaggacagaactgtatttcctgtcacctcaggagaatcgccccagcctctttggaatgccattgattgttccatgcactgtgcatacccagaagaaagacctatatgatgcggtttggattcaagtatcctggttagcaagaccactcccacctcaggaagctagtattcatgcccaggatcgtgataactgtatgggctatcaatatccattcactctacgagttgtgcagaaagatgggatctcctgtgcttggtgcccacagtatagattttgcagaggctgtaaaattgattgtggggaagacagagctttcattggaaatgcctatattgctgtggattggcaccccacagcccttcaccttcgctatcaaacatcccaggaaagggttgtagataagcatgagagtgtggagcagagtcggcgagcgcaagccgagcccatcaacctggacagctgtctccgtgctttcaccagtgaggaagagctaggggaaagtgagatgtactactgttccaagtgtaagacccactgcttagcaacaaagaagctggatctctggaggcttccacccttcctgattattcaccttaagcgatttcaatttgtaaatgatcagtggataaaatcacagaaaattgtcagatttcttcgggaaagttttgatccgagtgcttttttggtaccacgagacccggccctctgccagcataaaccactcacaccccagggggatgagctctccaagcccaggattctggcaagagaggtgaagaaagtggatgcgcagagttcggctggaaaagaggacatgctcctaagcaaaagcccatcttcactcagcgctaacatcagcagcagcccaaaaggttctccttcttcatcaagaaaaagtggaaccagctgtccctccagcaaaaacagcagccctaatagcagcccacggactttggggaggagcaaagggaggctccggctgccccagattggcagcaaaaataagccgtcaagtagtaagaagaacttggatgccagcaaagagaatggggctgggcagatctgtgagctggctgacgccttgagccgagggcatatgcgggggggcagccaaccagagctggtcactcctcaggaccatgaggtagctttggccaatggattcctttatgagcatgaagcatgtggcaatggctgtggcgatggctacagcaatggtcagcttggaaaccacagtgaagaagacagcactgatgaccaaagagaagacactcatattaagcctatttataatctatatgcaatttcatgccattcaggaattctgagtgggggccattacatcacttatgccaaaaacccaaactgcaagtggtactgttataatgacagcagctgtgaggaacttcaccctgatgaaattgacaccgactctgcctacattcttttctatgagcagcaggggatagactacgcacaatttctgccaaagattgatggcaaaaagatggcagacacaagcagtacggatgaagactctgagtctgattacgaaaagtactctatgttacagtaaagctaccactctggctgctagacagcttggtggcgagggagatgactccttgtagctgatacttggcaaaagtgtcactgaaagacaagctaaatgtagttattttatcctgttagaacaaaaattctaattaaaatagttaacttgaagagtagaaacaattgtattttgaagtctcatacaagctgtctgatagagaactttcaggcagatcccaccattagcctgtaaacaaaaggtgtggcaccagccacctgggaccaaataagaattgaattgtgcttgtccagatatgaacaaatatgtagtgagtatagagtttaccaataatcataacaaatattaaagatttccttggagtcagaggaaaaaacaaacaattataatgttgtctagggacgacatgatacgctacctcctttttcctgaagttttattccattatattgacaagatggagaaagcaagatcatgaaggtgtgcaaatgattcttacggcatggacaaggatttttcaatttattttttaaactgtttccataccctttctttttcttgctttttgtttttgccattgtgtttacgtttgagacacaaccagtcattggtggcaggggcatagagtggtcagtctgaaagggaggctctcttaagagctatgtgccttccaaccagagggagacccagtagaaagaaaaacatcctgggaaatccagctaccagggccctcccagtggaggcatcttacatttaggctacttcaagtatcctcagaaatgtattctgcacccccggccccgcccatgctgagggaaggggagcagttgccaatatttgcaccatcttcacatgcacatgttgcaacaagagcttctgggaaggtaagcggcatcggagctagatcacgtttcacaattagtggttattcttttctgtgtttgttttgcactttaaaaaagagagaacacatgcaaatgaacttgcttgtgtgtatttgatggctctaagggctataaattacaaacaaaacacatcccagacattaggagttcataagtatatttaatgaaattggtggttttaggaagtcaactttagttttgctttgtttgcatgtccactggtttttttattttgatatttgtctttttttaaattttacagtagtcattgaaagttatgtttctttgcttacttcattttttccctctaattatttaagattggaacaaaagtataaatattatttatttgaggtagaatttttttcatgtagtttcttaatatatacttgaaggaaatgtttcaccttatttttggtctttgtttattcatttagaccctgcaagttgattctcattgccagattccattaccctttcttcctcataggtagtaattaccaatgtaactaagcatttgtgttctgatatctgaggccagtaactattaatatctagttctcagagcatttggaaaggttatcttaaatggctacctaaattgaaatccttttcagaaaaaatataattgcaagtaggtaggagtggcctaaattgtctaatgtaataaagtcagacaaaatgcacactttatagtttcaagattttcagtaaataaaatctgtccattcctacctggacatgtcccattaaaaagtggaagattttaaataatttctttacagatgttttatttaaacaggtagcacaatctactaatgttgtgtgatttgtgttatactggttgtaattaatttttttaattcatgaactagcggaaaatttattaaattaactattaactacattcaccttgtaaattactgtataaaacttgttgacaatgcactgactttagaaagatgttaatgtacataaatagagtgtaaataaaatagtgttgatgtactgaaatatgaactgtatcaaaagtattggtaattgtatatggggtgtacctgtttatctgttaactattatccaaacaaattaaatactgtggttgcctctatgtgctgtttttcctcatacaagtaaacacagaaagtcaaaaaaaaaaaaaaaaaaaaaa

SEQ ID NO: 563 - DNA, 2454 bp, Homo sapiens
ccaggaggcacgctggttttccggggccgctccatcgcgccttcctcctgcgcctcgcttctccggtccagccgccatcttcctttccgcacaggggccgccgagcggggccatgcagccaacgctgcttctcagcctcctgggagccgtggggctggcggctgtcaattccatgccagtggataacaggaaccacaatgaaggaatggtgactcgctgcatcattgaggtcctctcaaatgccttgtcgaagtccagcgctccacccatcacccctgagtgccgccaagtcctgaagacgagtagaaaagacgtcaaagacaaagagacaactgaaaatgaaaacacaaagtttgaagtaagattgttaagagacccagctgatgcctcggaagcccacgagtcctccagcaggggagaggcaggagccccaggggaggaggacatccaaggcccaacaaaggcagacacagagaaatgggcagagggaggcgggcacagccgagagcgagcggatgagccccagtggagcctctatccctccgacagccaagtctctgaagaagtgaagacacgccattctgagaagagccagagagaggatgaggaggaggaggagggagagaactatcaaaaaggggagcgaggggaagatagcagtgaagagaaacaccttgaagagccaggagagacacaaaacgcttttctcaatgaaagaaagcaggcttcagctataaaaaaagaggagttagtggccagatcggaaacacatgctgccgggcattctcaggagaagacacatagccgagagaagagtagccaggagagtggagaggaggcagggagccaggagaatcacccccaggagtctaaaggccaaccccgaagccaggaagaatctgaggaaggtgaggaagatgccacctctgaggtggacaaacgacgcacgaggcccagacaccaccacgggaggagcaggcccgacaggtcctctcaaggagggagtcttccctctgaggaaaagggacacccccaggaggaatctgaggagtcaaacgtcagcatggccagtttaggggaaaagagggaccaccattcaacccactacagggcttcagaggaagaacctgaatatggagaagaaataaagggttatccaggcgtccaggcccctgaggacctggagtgggagcgctataggggcagaggaagtgaagaatacagggctccaagacctcagagtgaggagagttgggatgaggaggacaagagaaactaccccagcttagagcttgataagatggcacatggatatggtgaagaaagtgaggaagagaggggccttgagccgggaaagggacgccatcacagaggcaggggaggggagccacgtgcctatttcatgtctgacaccagagaagagaaaaggttcttgggtgaaggacaccaccgtgtccaagaaaaccagatggacaaggcaaggaggcatccacaaggtgcgtggaaagagctggacagaaattatctcaactacggtgaggaaggagccccagggaagtggcagcagcagggagacctgcaggacactaaagaaaacagggaggaagctaggtttcaagataaacaatatagctcccatcacacagctgaaaagaggaagagattaggggaactgttcaacccatactacgaccctctccagtggaagagcagccattttgaaagaagagacaacatgaatgacaattttctcgagggtgaggaggaaaatgagctgaccttgaacgagaagaatttcttcccagaatacaactatgactggtgggagaaaaagcccttctctgaggatgtgaactgggggtatgagaagagaaacctcgccagggtccccaagctggacctgaaaaggcaatatgacagggtggcccaactggaccagctccttcactacaggaagaagtcagctgagtttccagacttctatgattctgaggagccggtgagcacccaccaggaggcagaaaatgaaaaggacagggctgaccagacagtcctgacagaggacgagaaaaaagaactcgaaaacttggctgcaatggatttggaactacagaagatagctgagaaattcagccaaaggggctgactgtcattggagcggtgggcactgttaagaagcagccatcacatgatctgtttttcaccacttcactgaaagacaccatttatatacccaagggcagaaagtagaacttactattcattaaatgtttgacacaattggaattgtctttaatttctgtcagaatgctattgaaaatgtgaattgcatgacttgtagcatattcttttctgcaaaatagacatattaacatgcttatgacaatgactgtgctactgtctttggaaaaatgtttgtctcagttggaaataataaaagattcacctgagacc

SEQ ID NO: 564 - DNA, 5096 bp, Homo sapiens
ctcgggcaacggccgccgccgccacagccacacagccgccgccactgcgtccgtccccggtgagcgccgctgacgcgcggagatgaaattcccggcctcggtgctggcgtccgtgttcctgttcgtggccgagacaacggcggcgctcagcctgagcagcacctaccgctcgggcggggaccgcatgtggcaggcgctgacgttgcttttctcgctactgccttgcgcgctcgtgcagctcacgcttctcttcgtacaccgcgacctcagccgcgaccgcccgctcgtactgctgctgcacctgctgcaacttgggccccttttcaggtgttttgaagtcttctgcatctactttcagtcaggcaacaatgaagagccttatgtcagtatcaccaagaagaggcaaatgccaaaaaatggcctctcagaggagattgagaaggaggtgggccaggcagaaggcaaactaatcacccaccgatcagcgttcagccgggcgtcggtgatccaggctttcttgggctcagccccccagctgaccctacagctgtacataagtgtcatgcagcaggacgtcactgttggaagaagtctcctcatgaccatatccctgttgtccattgtgtatggagccttgcgctgcaacatcctagccatcaaaatcaagtacgatgagtatgaagtcaaagtgaagcctctggcctatgtctgtatcttcctgtggaggagctttgagattgccactcgagttgtagtcctggtcctctttacctccgtcctgaagacctgggtggtggttataatactcatcaacttcttcagtttcttcttgtacccctggatcctcttctggtgcagtggttccccattccctgagaacatagagaaggccctcagtagagtgggcaccaccattgtactatgctttctaactttactctatactggtatcaacatgttctgctggtctgctgtacagctgaaaattgacagccctgacctcatcagcaagtcccataattggtaccagctactggtgtattacatgataagattcatcgagaatgccatcctcctcctcctgtggtatcttttcaagactgacatctatatgtatgtgtgcgcacctctgttggtcctgcagctgctcattgggtactgcacagccattctcttcatgcttgtattctatcagttcttccacccttgcaaaaagctcttttcttccagtgtttctgaaggctttcagaggtggctcaggtgtttttgctgggcctgcaggcagcaaaaaccctgtgagccgataggaaaggaagatctacagtcatccagagatagagatgagacaccttctagcagtaaaacaagtcctgagcctggtcagttcttgaatgctgaagatctctgctctgcttaatgggacccaaggtctcagagcacaggcatattattttctgggtttgatactcgttattcatacaaataatgagccctacacagggaacaaggcaggaagttagctgttaactccttgtgagctgcttctctttatagagctcttgggtatgtagaactgtatgggaagaagccaggaaaacctctgagtgttgaaggggcaacccaaggcatcacagttcacaggtaaccatgttgtgttcttctaggcattactggccttttcactgacaagttacccctgaaatctgagttgtactggttagattcattaggttgaatgaggagaggggcttacctgttctctagttttccagactgctggtttgggtaacctgaagttttatgatccctgaacatagttttcacccaagagctgtcctggtgaccaaaaaagattactagggttttgccatcagcaacatcattcctgtcagagctttcagggagggctgttcaagtttggtttttgaatagacagaggtttcattttcatctcattagggcttttttgtacatagccaactgtagccaccctggcatgctgtctctaattgattcaagggcctagatttggagactttgttccttagcatccatggatgcagaaatgagtgataaatttggccatgaaagccctggaattttaggaaagttgtgattctttgatatgttgatgaaattctggatcaggaggggtgttaaaacatcaaaatgatggcgacttgtataagtagaattcttaccatcttactcctgcctccccattccttgcctgtcaggaccattttagaagagttaccttggttaacttaagggttttttagaaaaccccacagaaatctctcacccagttcaggtgtatagggaattttcattttcattatttcaaggaatagagttttcctcactaccacttgtaattagagattgacttcagaaactttttctaaattataaagacggaatgaccagaaaatttttgtctttcatggaatgcaatttgacttggcataattgtgagttaatttgataaagatctccagttgtatcctctgacaccctttaatgttctatataatttttcctttaatcggagaccctatttgtttcattaaagaggattgggtagcatatcctcaattatcttggaaaaatgcgtagatctagtgccattatttctaccattaaaatcttgaaagcgaaatacttgaaaagaggtgaccataaagatcacaccaatttagaatgaatattaaagtctgagaaatttacaaaagggactctatggactcgattttaccatatggaatagggatccacttctctgttaacctacaaaacgtatttatctggccattgcacttcggataattttcatttttaattcctcttggtgtcaaatttttaagtaatttcatgcacacaggagaaaatgcaatttgataatcagtttccactacattcggaggtcaagaaagcagtatatattctttcacaaggcatccatactgtttaatatttatagagttcatagaaatacatcaataagctcctaaattatagagcctcaattttggtttttctcatttgaaatgtttttgatttatcaatatttgtggtttaactttgtgggggtgtccaggcagtagatcattttttgtctatttttaaccaaataagaataacactcaagactatgttctccatcccaacacatcacttaccacttgcactattcttaataggcctaaaatagtgagcatatataatcaaaataatacttcatacaacatatacttccatgcactcttcatgtaatcacatatgtgcatagatacacaatcgtattacataaaacacccttgaaaatatatgactttgaataaaataaagctaccatgttaatacatcattttttgtttcttcctaattaacaaaagggctctataatgattaggagagctgtaaggccattctttagtcattccaagtgtatatttgtatcacaccagttacttgtgttcattgacaccaaatattttcaagctttttgtgagaaagagattcttgccttgaggctctgcagtggcaaatggtaggggcaatagcgctcccttttcacctgaaatgccttcagctcaggccttgggagtgaggtgtgggagtagccaccagcctcccactgactaggcatgttaggaattagacaaggatggagagactggttttttccagccttggtttggaagcttgtctcaaaaaccattacaaaatcttaaccttcaaatacattctaaatcactttaatttagaagataggtgagcaacttgagtgatcccaaaccaaactaacagtgctggtttgtccgacacccaaagcccacttcacacatttataaggacagagatttggtaactcatttgggtattttgtcagttttaacccttaatatacaggtatcccagctttgggcacatgtatgtccattcactttcaggaaggggtgtcagtactttctttctgtgtggtgaaaacataagccatggtgaactgataatttttgtttttaaattatttatattactgaattggcaaaattacagttcacactgcagagctaggttgtcctattggcataaaacaaaccagcaacttttctcatgtgtttggagtttggagttaaaatgtgtttttcagttataatttcaatttttaaatttcttggtgctttgtctaattaattacatcccataacttgtcaggatagttgctccaactgaattgctatcatttggctggatgggggtgaagtatgtcttcaaaatatattgaagtaagttcatcaaacatgtttagacttcctctcattgctggagacagcccagtgtagagattggcacttccctgtccagcactacaacttaattgctctatgcctcagtttccccataatacccttttccaacctacctcacaaggttatcagaaagatcaaattaaataatagatgtgaaaatgctttgaaaatgtttttaagtgctatgcatatttatagagttattatagttattcaaatccataagcaggttatttttatttttttactgtttgaaaagaaataagtagtgtcattcatatgagttcctgagtggatatgcgaatctttggtcttctcgacaggtgccctttctcttaccactagttgcttacaaaaatagcacccaaacacatggcacttggaagaaaaagacccactgaatctgagaaagtactttctggtggcaaatgaatttatcattttagtatagttttcgataaaggatatagcaacatcttttgataattgtgctttacaacttgaatgctgattcaaggcattatttggatgtgagtttaatcttttcagccttgtaaatgggaaaatatatattaaaattgattgtcaaatacagcatttctttggaaaccaccttaaaacattagtgctatggttatgagtgtatgtgccagtacttaccagtcaatgcattgtggatatgagctttcgttgactgcttctctgcagtcgttgatgctaataaatattgtcctgtttcttcatataataaattaatttttcaatttctccttgtaaaaa

SEQ ID NO: 565 - DNA, 420 bp, Homo sapiens
gggggctggccgagcgccgtgcgcgcttgggagaaggccggaagcttaccagccgagaaggaattcctagctagcttcagagccggtgcctccggagccagcgtggtggccatagacaacaagttcgaacaggccatggatctggtgaagaatcatctgatgtatgctgtgagagaggaggtggagatcctgaaggagcagatccgagagctggtggagaagaactcccagctagagcgtgagaacaccctgttgaagaccctggcaagcccagagcagctggagaagttccagtcctgtctgagccctgaagagccagctcccgaatccccacaagtgcccgaggcccctggtggttctgcggtgtaagtcgctctgtcctcagggtgggcagagccactaaacttgttttacctaggg

SEQ ID NO: 566 - DNA, 2532 bp, Homo sapiens
agtgcactcaagcagagaagaaatccacaaagactcaccagtctgctggtgggcagagaagacagaaacgacatgagcacagcaggaaaagtaatcaaatgcaaagcagctgtgctatgggaggtaaagaaacccttttccattgaggatgtggaggttgcacctcctaaggcttatgaagttcgcattaagatggtggctgtaggaatctgtcgcacagatgaccacgtggttagtggcaacctggtgaccccccttcctgtgattttaggccatgaggcagccggcatcgtggagagtgttggagaaggggtgactacagtcaaaccaggtgataaagtcatcccgctctttactcctcagtgtggaaaatgcagagtttgtaaaaacccggagagcaactactgcttgaaaaatgatctaggcaatcctcgggggaccctgcaggatggcaccaggaggttcacctgcagggggaagcccattcaccacttccttggcaccagcaccttctcccagtacacggtggtggatgagaatgcagtggccaaaattgatgcagcctcgcccctggagaaagtctgcctcattggctgtggattctcgactggttatgggtctgcagttaacgttgccaaggtcaccccaggctctacctgtgctgtgtttggcctgggaggggtcggcctatctgctgttatgggctgtaaagcagctggagcagccagaatcattgcggtggacatcaacaaggacaaatttgcaaaggccaaagagttgggtgccactgaatgcatcaaccctcaagactacaagaaacccatccaggaagtgctaaaggaaatgactgatggaggtgtggatttttcgtttgaagtcatcggtcggcttgacaccatgatggcttccctgttatgttgtcatgaggcatgtggcacaagcgtcatcgtaggggtacctcctgcttcccagaacctctcaataaaccctatgctgctactgactggacgcacctggaagggggctgtttatggtggctttaagagtaaagaaggtatcccaaaacttgtggctgattttatggctaagaagttttcactggatgcgttaataacccatgttttaccttttgaaaaaataaatgaaggatttgacctgcttcactctgggaaaagtatccgtaccgtcctgacgttttgaggcaatagagatgccttcccctgtagcagtcttcagcctcctctaccctacgagatctggagcaacagctaggaaatatcattaattcagctcttcagagatgttatcaataaattacacatgggggctttccaaagaaatggaaattgatgggaaattatttttcaggaaaatttaaaattcaagtcagaagtaaataaagtgttgaacatcagctggggaattgaagccaacaaaccttccttcttaaccattctactgtgtcacctttgccattgaggaaaaatattcctgtgacttcttgcatttttggtatcttcataatctttagtcatcgaatcccagtggaggggacccttttacttgccctgaacatacacatgctgggccattgtgattgaagtcttctaactctgtctcagttttcactgtcgacattttcctttttctaataaaaatgtaccaaatccctggggtaaaagctagggtaaggtaaaggatagactcacatttacaagtagtgaaggtccaagagttctaaatacaggaaatttcttaggaactcaaataaaatgcccacattttactacagtaaatggcagtgtttttatgacttttatactatttctttatggtcgatatacaattgattttttaaaataatagcagatttcttgcttcatatgacaaagcctcaattactaattgtaaaaactgaactattcccagaatcatgttcaaaaaatctgtaattttgctgatgaaagtgcttcattgactaaacagtattagtttgtggctataaatgattatttaggatgatgactgaaaatgtgtataagtaattaaaagtaatatggtggctttaagtgtagagatgggatggcaaatgctgtgaatgcagaatgtaaaattggtaactaagaaatggcacaaacaccttaagcaatatattttcctagtagatatatatatacacatacatatatacacatatacaaatgtatatttttgcaaaattgttttcaatctagaacttttctattaactaccatgtcttaaaatcaagtctataatcctagcattagtttaatattttgaatatgtaaagacctgtgttaatgctttgttaatgcttttcccactctcatttgttaatgctttcccactctcaggggaaggatttgcattttgagctttatctctaaatgtgacatgcaaagattattcctggtaaaggaggtagctgtctccaaaaatgctattgttgcaatatctacattctatttcatattatgaaagaccttagacataaagtaaaatagtttatca

SEQ ID NO: 567 - DNA, 2288 bp, Homo sapiens
ccgccgcccgccacactcgccccccgccccccccgcgcctcactcgcactcacacccgggcgcaggaggcgggcggcccgggccccaccggccccccatggacgcccccagcacggggcgctgagacccccgcgtcgctgcccagcccggtccggcgcgccacgccgagggatctctggacaggacaagactccgaagctactcccccagcacacagcccgggacccacaaacccagcttgcccccagccctcccacctgccactccctggcccctcccaccgcccgccccccttggggcgcagggcatggtgtgaaaggccaagtgctgaggcgggtatcatgggtgctgtgccctagggcctgggtggcagggggtgggtggcctgtgggtgtgccgggggggccagtgtgcccaccacagtctcttggcgtgctggagggcatcctggatggaattgaagtgaatggaacagaagccaagcaaggtggaatgtgggtcagacccagaggagaacagtgccaggtcaccagatggaaagcgaaaaagaaagaacggccaatgttccctgaaaaccagcatgtcagggtatatccctagttacctggacaaagacgagcagtgtgtcgtgtgtggggacaaggcaactggttatcactaccgctgtatcacttgtgagggctgcaagggcttctttcgccgcacaatccagaagaacctccatcccacctattcctgcaaatatgacagctgctgtgtcattgacaagatcacccgcaatcagtgccagctgtgccgcttcaagaagtgcatcgccgtgggcatggccatggacttggttctagatgactcgaagcgggtggccaagcgtaagctgattgagcagaaccgggagcggcggcggaaggaggagatgatccgatcactgcagcagcgaccagagcccactcctgaagagtgggatctgatccacattgccacagaggcccatcgcagcaccaatgcccagggcagccattggaaacagaggcggaaattcctgcccgatgacattggccagtcacccattgtctccatgccggacggagacaaggtggacctggaagccttcagcgagtttaccaagatcatcaccccggccatcacccgtgtggtggactttgccaaaaaactgcccatgttctccgagctgccttgcgaagaccagatcatcctcctgaaggggtgctgcatggagatcatgtccctgcgggcggctgtccgctacgaccctgagagcgacaccctgacgctgagtggggagatggctgtcaagcgggagcagctcaagaatggcggcctgggcgtagtctccgacgccatctttgaactgggcaagtcactctctgcctttaacctagatgacacggaagtggctctgctgcaggctgtgctgctaatgtcaacagaccgctcgggcctgctgtgtgtggacaagatcgagaagagtcaggaggcgtacctgctggcgttcgagcactacgtcaaccaccgcaaacacaacattccgcacttctggcccaagctgctgatgaaggtgactgacctccgcatgatcggggcctgccacgccagccgcttcctccacatgaaagtcgagtgccccaccgaactcttccccccactcttcctcgaggtctttgaggatcaggaagtctaaagcctcaggcggccagagggtgtgcggagctggtggggaggagcctggagagaaggggcagagctgggggctgagggagacccccccacaccccttctctccttcctctcgtccttggatagattcagctcccacacacacacccgcactgcccaggtccctcctcagacctccagccctgggacaggcaaacaactgaacttgctatggaaaggacagtgtgggaggctgggggagctgtgttctgcagttcccaggaccccatcctctcagaaggtaggggaagggcgggaggattgagaagggacaagccaccttgaccgtagggaaggaggaatgtgggctgggggaagatgccctcaactcaccccctacacacacatgagagagagcccccacccagttccttggcctaggtctcccctccaggctgagggcctctctacttccccagatgcctgggtgcaaagaacggcttggcttggctcctcctctggagttaaaatttatagtcattctaactgcactttggaaaccaagcaaggggagaagacaaatgaagaaaaactagacagagaaaaaaaaaaaa

SEQ ID NO: 568 - DNA, 2244 bp, Homo sapiens
gcacgggacaggccgggccacacccaccggggcgagctcggagggcggcgctctgggcggagggcccggcggctcggcccagggcgcgttacctcgtcgccggggccggagagggcgggcggaggcacggggcctggaggcgccaggcggaggatgcgggcgacacggtggcggcggcgaccgcgcgaccgggcgggcgggcgggcaggggcgagcggagggagggagcggactgcggcaggatctgtcgaggaaaaatcttgcggccggcgattccccgccttttaagcgcagcctgcactccccccaccccacgcaggggcgggccttccccaacgcgggcgcccactggccgccgcgcgccgctcccctccagctcgcctgcgcctctcactctccgtcagccgcattgcccgctcggcgtccggcccccgacccgcgctcgtccgcccgcccgcccgcccgcccgcgccatgaacgccaaggtcgtggtcgtgctggtcctcgtgctgaccgcgctctgcctcagcgacgggaagcccgtcagcctgagctacagatgcccatgccgattcttcgaaagccatgttgccagagccaacgtcaagcatctcaaaattctcaacactccaaactgtgcccttcagattgtagcccggctgaagaacaacaacagacaagtgtgcattgacccgaagctaaagtggattcaggagtacctggagaaagctttaaacaagtaagcacaacagccaaaaaggactttccgctagacccactcgaggaaaactaaaaccttgtgagagatgaaagggcaaagacgtgggggagggggccttaaccatgaggaccaggtgtgtgtgtggggtgggcacattgatctgggatcgggcctgaggtttgccagcatttagaccctgcatttatagcatacggtatgatattgcagcttatattcatccatgccctgtacctgtgcacgttggaatttttattactggggtttttctaagaaagaaattgtattatcaacagcattttcaagcagttagttccttcatgatcatcacaatcatcatcattctcattctcattttttaaatcaacgagtacttcaagatctgaatttggcttgtttggagcatctcctctgctcccctggggagtctgggcacagtcaggtggtggcttaacagggagctggaaaaagtgtcctttcttcagacactgaggctcccgcagcagcgcccctcccaagaggaaggcctctgtggcactcagataccgactggggctgggcgccgccactgccttcacctcctctttcaacctcagtgattggctctgtgggctccatgtagaagccactattactgggactgtgctcagagacccctctcccagctattcctactctctccccgactccgagagcatgcattaatcttgcttctgcttctcatttctgtagcctgatcagcgccgcaccagccgggaagagggtgattgctggggctcgtgccctgcatccctctcctcccagggcctgccccacagctcgggccctctgtgagatccgtctttggcctcctccagaatggagctggccctctcctggggatgtgtaatggtccccctgcttacccgcaaaagacaagtctttacagaatcaaatgcaattttaaatctgagagctcgctttgagtgactgggttttgtgattgcctctgaagcctatgtatgccatggaggcactaacaaactctgaggtttccgaaatcagaagcgaaaaaatcagtgaataaaccatcatcttgccactaccccctcctgaagccacagcagggtttcaggttccaatcagaactgttggcaaggtgacatttccatgcataaatgcgatccacagaaggtcctggtggtatttgtaactttttgcaaggcatttttttatatatatttttgtgcacatttttttttacgtttctttagaaaacaaatgtatttcaaaatatatttatagtcgaacaattcatatatttgaagtggagccatatgaatgtcagtagtttatacttctctattatctcaaactactggcaatttgtaaagaaatatatatgatatataaatgtgattgcagcttttcaatgttagccacagtgtattttttcacttgtactaaaattgtatcaaatgtgacattatatgcactagcaataaaatgctaattgtttcatggta

What is claimed is:

1. A process for identifying an agent that modulates the activity of a cancer-related gene comprising:
(a) contacting a compound with a cell containing a gene that corresponds to a polynucleotide having a sequence selected from the group consisting of SEQ ID NO: 1-568 and under conditions promoting the expression of said gene; and
(b) detecting a difference in expression of said gene relative to when said compound is not present
thereby identifying an agent that modulates the activity of a cancer-related gene.

2. The process of claim 1 wherein said gene has a sequence selected from the group consisting of SEQ ID NO: 1-568.

3. The process of claim 1 wherein the cell is a cancer cell, the sequence is selected from SEQ ID NO: 1-314 and the difference in expression is a decrease in expression.

4. The process of claim 2 wherein the cell is a cancer cell, the sequence is selected from SEQ ID NO: 1-314 and the difference in expression is a decrease in expression.

5. The process of claim 3 or 4 wherein the cancer cell is a stomach cancer cell.

6. The process of claim 1 wherein the cell is a non-cancerous cell, the sequence is selected from SEQ ID NO: 315-568 and the difference in expression is an increase in expression.

7. The process of claim 6 wherein the cell is a cell from stomach.

8. The process of claim 2 wherein the cell is a non-cancerous cell, the sequence is selected from SEQ ID NO: 315-568 and the difference in expression is a decrease in expression.

9. The process of claim 8 wherein the cell is a cell from stomach.

10. The process of claim 1-9 wherein expression is determined for more than one said gene.

11. The process of claim 1-9 wherein expression is determined for at least 5 said genes.

12. The process of claim 1-9 wherein expression is determined for at least 10 said genes.

13. The process of claim 1-9 wherein expression is determined for all said genes of step (a).

14. A process for identifying an anti-neoplastic agent comprising contacting a cell exhibiting neoplastic activity with a compound first identified as a cancer related gene modulator using a process of one of claims 1-13 and detecting a decrease in said neoplastic activity after said contacting compared to when said contacting does not occur.

15. The process of claim 14 wherein said neoplastic activity is accelerated replication.

16. The process of claim 14 wherein said decrease in neoplastic activity results from the death of the cell.

17. A process for identifying an anti-neoplastic agent comprising administering to an animal exhibiting a cancer condition an effective amount of an agent first identified according to a process of one of claims 1-16 and detecting a decrease in said cancerous condition.

18. A process for determining the cancerous status of a cell, comprising determining the level of expression in said cell of at least one gene that corresponds to a polynucleotide having a sequence selected from the group consisting of SEQ ID NO: 1-568 wherein an elevated expression relative to a known non-cancerous cell when the sequence is one of SEQ ID NO: 1-314 or a reduced expression relative to a known non-cancerous cell when the sequence is one of SEQ ID NO: 315-568 indicates a cancerous state or potentially cancerous state.

19. The process of claim 18 wherein said RNAs are identical.

20. The process of claim 18 or 19 wherein said expression is the expression of more than one said gene.

21. The process of claim 18 or 19 wherein said expression is the expression of at least 5 said genes.

22. The process of claim 18 or 19 wherein said expression is the expression of at least 10 said genes.

23. The process of claim 18 or 19 wherein said expression is the expression of all said genes.

24. A process for determining if a test gene is a cancer initiating or facilitating gene comprising contacting a cell expressing said test gene with an agent that decreases the expression of a gene that corresponds to a polynucleotide having a sequence selected from the group consisting of SEQ ID NO: 1-314 and detecting a decrease in expression of the test gene compared to when said agent is not present, thereby identifying said test gene as being a cancer initiating or facilitating gene.

25. The process of claim 24 wherein the gene determined by said process is an oncogene.

26. The process of claim 24 wherein the gene determined by said process is a cancer facilitating gene.

27. The process of claim 24 wherein said decrease in expression is due to a decrease in copy number of said gene in said cell or a cell derived from said cell.

28. A process for determining if a test gene is a cancer suppressor gene comprising contacting a cell expressing said test gene with an agent that increases the expression of a gene that corresponds to a polynucleotide having a sequence selected from the group consisting of SEQ ID NO: 315-568 and detecting an increase in expression of said test gene compared to when said agent is not present, thereby identifying said test gene as being a cancer suppressor gene.

29. The process of claim 28 wherein said increase in expression is due to an increase in copy number of said gene in said cell or a cell derived from said cell.

30. A process for treating cancer comprising contacting a cancerous cell with an agent having activity against an expression product encoded by a gene sequence selected from the group consisting of SEQ ID NO: 1-314

31. The process of claim 30 wherein said cancerous cell is contacted in vivo.

32. The process of claim 30 wherein said agent has affinity for said expression product.

33. The process of claim 32 wherein said agent is an antibody.

34. The process of claim 30 wherein said agent is an apoptosis-inducing agent.

35. A method for producing a product comprising identifying an agent according to the process of claim 1-17 wherein said product is the data collected with respect to said agent as a result of said process and wherein said data is sufficient to convey the chemical structure and/or properties of said agent.

36. A process for treating a cancerous condition in an animal afflicted therewith comprising administering to said animal a therapeutically effective amount of an agent first identified as having anti-neoplastic activity using the process of claim 17.

37. A process for protecting an animal against cancer comprising administering to an animal at risk of developing cancer a therapeutically effective amount of an agent first identified as having anti-neoplastic activity using the process of claim 17.

38. The process of claim 36 or 37 wherein said cancer is stomach cancer.

39. A process for determining functionally related genes comprising contacting one or more gene sequences selected from the group consisting of the sequences of SEQ ID NO: 1-568 with an agent that modulates expression of more than one gene in such group and thereby determining a subset of genes of said group.

40. The process of claim 39 wherein said functionally related genes are genes modulating the same metabolic pathway.

41. The process of claim 39 wherein said genes are genes encoding functionally related polypeptides.

42. The process of claim 39 wherein said all of genes are genes whose expression is modulated by the same transcription activator or enhancer sequence.

43. The process of claim 39 wherein said sequences are selected from SEQ ID NO: 1-314.

44. The process of claim 39 wherein said sequences are selected from SEQ ID NO: 315-568.
